United States Patent Application Publication US 2026/0258423 A1 - sequence listing, part 72

SEQ ID NO: 301568 - DNA, 83257441 bp, Homo sapiens (residues 70,448,632-72,583,438 of 83,257,441)
  source 1..83257441: mol_type = genomic DNA
tccagggtctaggcaccagcagatctggtgtctggtaagaccccgggtctcccagatggctctttcttttctgagtcctcacttagcagaaagaaaaaacaagctccctcagcctttctaaaataagggcactcatcccattcatgaggatggggcccttatgacctaatcaccttctgtattagtccattttcatgctgctgacacatacccgagactgggcaatttactaaagaaagagctttagtgggcttacagttccacatggctgaggaggcctcacaatcatggtggaaggtgaaatgcacatctcacatgggggcagacaagagaagagagatggtgcagggaaactcccctttataaaaccatcagatcttgtgagacttattcactatcatgagaacagcacaggaaagacctacccccatgcaattacctcccactgggtccctcccacaacacatgggaattcaagataagatttgggtggggacacagccaagccacatcacctttgaaaggtaccacctcttaaaaccaacaccttaatactttgggggttaagtttcaacatatgaatgttggagggacataaacattcagccccatagcacctgataaaccagaacagcctcatagagtccatattgaaatcaggtctatttaattcccaataccctttctccttatctcccaatattatattggataggcttatgccccaggaccttcttacattgaatttaattgaatttattgaattttgttatcttttcccattagactgtatatagaagctccttggaaatatcagaaaattaaagtgtttattttaacacaaatgcatggaaacagtttaatatgaaatcagtccttagaaccctgaaaattataactttgtaagtatggtattatgtactaaagaacagtgagtccaaccctatagctatgagaactgccacatctaagggaactgagctattgcctttacatttccaacatttaattgaagcctttttagaaagaacaagatgtcctgtgagctttgcctgagcctgctctaggattccacataaatgagtacagcaactctacatgataaaagacatcctaatatacctcgtcacagttgaatctcaatgtcactgtcaaagggacgttagggatagaaagtttttcttgggcaaaggatttagaccttttattgctttcctaaagctgaagagcagagggggaaatcagggaattatttaaaacaacttgtgtttgcatattagctccccatgtttcttaagatttttaaaaaaattttaattaatttttaatgacagatgcaacactatgcctttcctggaagaataaatttaaaaaaatggaaacaattgtatttggaattctgcaccatttcctagctttgatgataaggaataatctgctaaggacactgagtacctacagcagttctctacactttttataagcacagtataactgcaaaacgtccagtttgcttacttagaaacgtttaaatgttcactttcttaagaataatcacagtgagttcagaactaatagcttattgaccatcacaacaagtttgctcagggtggattttgttacctccttttacaggagaagaaattaaagttcaggttaaatgacttgccttcacaatcccagcccctcaaccaaaaaaataaaagaaattaaatgaattgcctcacattcctagctccctatccaaaaaataaaaggagggaagtggaggggaggggagaggaggggagaggtaagggaaagaagtggggagtgggaagtgggggaggggaggggatccattgagaaggcaaaattttcagctcagccttgagaatttttggactttattctttccaaagtattgttctgtgattttttttgaaaaaaattataaataaatgataaaccttagtaaataaagatttctgagggccattgaacagaagtgccctattttctatatggtagctatgcttatacaaaatctgtctttatggcaatgttgaaagtaccactgtcattctaatagcaaagtaccacaacttaccctacttacaagtgaagcagttaagaaatgtgcttccttgctaagtcaaatcttttatgaaaggtaatagaagtaacaccaaatagcatgacagccttggtaactggcagcatggaggatgggagaattttaatttacactctagaattttcaaatctgaatcttttggaagagaacaagagtgaaattattgccccccccccacaaatttgcatctttcatggctgcatatatacatttctaaattgttttttaaagggctttaccaatttacactgttccttaaatgtataagctaattttactaaatttacaccagcctgaggtttataacgccatttaggggataagtgatattccacctattcatacctgatgcagtttccagaaaagtaatttttatttgagcaggtcttgtacatctttttgatacttataaagtatgctctgaatgcctgcctagtcattctcttttggaaggaagtgttcaaaatagggttggacatagctgggatttaaatgtttcttaatgttagtttctgatagctttgtagaatttttttttcaaatatatatacatatatacacataataatatttgtttttagtattgattttatactactattatgctgtttggagaatgaattatatatggtagggaagatacttttttttttttttcagagggagtcttgctttgtcgaccaggctggagtgcagtggctgaatctcggctcactgcaacctctgcctcccacgttcaagcaattctcctgcctcagcctcctgaggagctgagattacaggcgtctgccaccatgcccagctaatttttgtatttttagtagagacggggtttcaccatgttggccaggctggtctcaaactcctgacctcaggtatccacccgcctaggcctcccaaagtgctgggattacagcatgagccatagttcctggctggaagataaaattttgacatctttcataaattgcaaactgagtcagaacagccatggttgtggttattttttttttaataatttatggaagtttttttaattttatttttattttttattttttgttttaggtttaagctagtgtttctgtgtaaaatattctagaatgtgaagatttacaaagcaaacttgtttcaagttcctaacagccaaactaccataacctggattcctaggtttttgggggtaggaaacatgacattcctatgataatatgttacttttatacaatcctttatacaaggattgagggtagggtatttctataattctttctgatttaaagaaaagtagaaacatggcaaaatttgaaagtttttagaattcattaaaatttcttaacctctgttttttaatggccacccagaacagtgacaacatcaaatgttagtgagggtttggtgtaacaggaactctcatttgttgctggtgagaaggcaaaatggtacagccactttcgaagacagtttggcagtttcctacaacactaaacatatgcttactgtataatccaataatcatgcttcttggtatttacccaaaggagctgaaaacctgtgtctacatatcaacctggtgcttataacagctttattcataattgccaacatttagaagcaaccaagatatcctttagtagctgaatgaataaataaactgtagtacatacaggcaatggaatattattcagtgctgaaataaatgagctgtcaagccatgaaaagacatggagaaagctaaaatgtatactactaagtgaaagaaaccaatctgaaaaagcaacatattgtgtgatcctgactatacgatattctgcaaaagacaaaactgtagagtccataacaagatcagtggtttccaggggaagtggaaggagggatgaataggtgaagcaccaaggattttttgaggcagtgaaactcttctgtattatactataaattgttgatacacatcattgtatatttgtcaaaacccacagaatgcacagcaccaagggtaaccctaacgtaaactatggactttgagtgataatcctgcattggtgtagattgatcagttgtaacaaatgtaccattgtgatgcaggatgttgatagtgatggaagttttgtgtgtgtgaaggcagggatatatgggaaatctctgtaccttctgctcatttttttctgtgaacttaaaacaactctagaaaataaagtctatttaaaagggaaaaaaagtcttcacaacatgctcataataaatagcaattgcaagagaatgctactaacttctctctgtcaacctttttttttttttttttttttggagacggagtctcactatgttgctcaggctggagtccagtggcgcgatcttggctcactgcaacctccacctcctgggttcaagcagttcttctgccacagcctcccgagtagctgggactacaggcacacgctgccacgcccggctaattctgtgtattttagtagagatggggtttcaccattgttgcccaggctggtctcgaactcctgagctcaggcaatccgcccacttcggcctcccaaagtgctaggattacgggcatgagccatcgcgcctggcctctgtcaacctgtcttgagaagtaatgaccagattctccaagtccaagtggttaaatagatttttccttgcacattgtccttaagtcattgaaaaaacacctttttattacctcagtttctatcacactatgatgaaggaataaagtactagctttgagaattcaagaactttataaattattaattattcaaaattattaagcaacagagttacaataatagcattccttttcatagaagctggcaatgagtagatgcgttatggagtgtttattctggttattgcctatgcatttctctaacacaaacgcatcaacatctgccttctcttcacttgcattctaatacagagatggcaaatgaaacagagttgatagttacaggacattgaaaatttaaatgtattttaaaatattgtggaaaaaggaattttaattctcaccaatgggttttattttaaaacctgtaccttttgtagaactcagatttttgcctttgctacttgcttatatctagctctagtcatctccaaaattagcatctctgggtaaattcaaatagttaaaaaaaaaaaaaaactcctgtggccaaaatttacatggtgagataaaatgaagtgaagaattagagcagccatttgtatactatgtttagaaaaaataaatattctccaggagaaaaaaatatggtgacttaagttgcctcattttaaggatggcattcgttacaagatctggagatcttatctttattgaaatggagttttctatcctacatgtggaaagtatagtgatggttattcctgtaatggtgacttagaggcattctaacaattgagggattgtatgaattatgtgaatgtaaaataaactatgattttaagactgaagtattattgcattttttcaaattatgaagagttttaatataagagattagaggcttaaacaactagtgaaggggtagacaaatgaagcctaaagaaactattatccaaagtcttagcttcagcatcaaagtaagtgattctcaatagcttaacataaaatttctgcaaatctcaagaactcctgggtatctcctaatgtacttttatcagtctgaggctccaatgtggatgattatcaaaagttcacttggaaaccgcttcaaacattctgtctagtcccgtatccgcctgcctcttattctttccagacttcccaactggacttcaacctctgcctttcataaactctagctctatttcaggaaccatatgcataagcaaattctggaaaatgtagctcccagttcctcctctgcattgaagaggaaacgttaggaaaagctggtggtaatgtccagtggaaacagataaacagatgtaccatgatcttacctcttcaatagctatttctttgacattgagtgttttgatccaataatatatctgcctacatattttgcaaatagttgtaagcctggtatacgtgcctgaattattttacagatgcctataaaaatgtaaagtttacattaaaagagagagagaaagaaagaaagaaaagaaagaaggaaagaagaaggaaggaagggaaaagaaaggaagaaacaaaaagaaaagaaaaggaaagaaggaagaaagaaagaaaaggaaggaagggagggatggaggaaaggaaggagggagggaggaaggaaggaaaggaagggaaggaaggaagggagggagggacagagggatggagggagggaagaagaaaagaagggttaactgagcttcttgggttggcagattattgactttccttacattttgggaatttggggccattatttcttcaaatacttccctgctttcaccctcttcttttgttatgggactcctattacacatatgtatgcctaataatgttccacagatctctgagattctgtttatttttcctggtttttcttctgttttattttcagatagtttatactgatctgtcttcagaatgattggttctttttttcctgaccacatgaatcattaatggagcttcttttgaatttttccttttacttttcacatcaaaatttccatttgctttttgtaattgttatctctttcataagagcttctattcattgagtcattatcattagacttgcctttaattctttaaacatgctttttagagttactttatttatttttattttgttttattttattttaagttccaggatacatgtgcaggatgtgcaggtttgtgacacaggtaaatgtgtgccatgatggtttgctgcacctgtcaacccatcatcacctaggtattaagcccacctaggtattagctatttttcctggcaccctccctacccctctccccacccactgacaggccccggtgtgcattgctcccctccttgtgtccatgcgttctcattattcagctcccacttttaagtgagaacatgtggtgtttgcttttctgttcctgcaatagtttgctgaggataatggcttccagctccatcgatgtccctgcaaaggacatgacttcattccttttatggctgcatagtattccatggtgtatatgtaccacattttctttatccagtcttcatcgatggatatttgggttgattccatgtctttgctattgtaaatggtgctgcaatcaaatacacgtgcatgttcatttatagtagaatgatttatattcctttgggtgagtagccagtaatggaattgctgggtcaaatagtgtttctggttttaggtctttcagaaatcaccacactgtcttccacaatggttgaactgatttatattccctccaaaagtgtaaaggtgttcctgtttccacagcctcaccagcatctgttgtttcttgatgttttaataattgccattctgactggtgtgagatggtatctcactgtgcttttgatttgcatttctctagtgatcagtgatactgagcttttttcatgttttttggccacataaatgtcttcttttctatacaccaacagtagacaagcagaaagccaaatcatgaatgaattcccactcacaattgctacaaagagaataaaatacctaggaatagagctaacaagagaaataaaagacctcttcaaggagaactacaaaccactgctcaaggaaatcagagaggacacaaataaatggaaatacattccatgctcatggataggaaaaatcaatatcatgaaaatagccatactataaagttattttaacatatgtttaacataggtcctttgacgtctttgctaaatccaaaatcagtgggttggtggtggtggggtgttcagtcacacattttccattgattgctttgttttttcctgagtatgagtcacactttcttcttcacataattttaattgaggattatatttttagataatatagcagtataatattgctttttgattcttttaatatttgctattgatttttacttttttccttcattagtgtttttttggcttttatttgtttctcatttttaaatcggagaggtctgtctctgccaaaatgtatggctgctgtttctactggaatttttttctgatgttattattttgtctggtttttatgtttaagccttttttcctggggtggcccggtgtctgcacagtttactgttctgctgaagattagttagaggttacattcaaacagctaaagccaggaaagctttccactgcctgctgatgactctgtatgggctggagagcacgttcaaacatcaggctgttttaagaagtctgcccattttactttccatcgagctcacttgtgtgtctcctgagcatgtgcactggcttcataagccagggatatgtgagttgcttgagttcactctagcctctactgcacacgcacacaacttctggttaaagctggttatgcagaacatttaccaatcccattaagtctgccttacttactggagctccttgtttaatgtctagctattcaaatttaagctagcagagctactggccctcccttttcacttgccaccaagataaccactcacattagtcagggttctcagagaaacagaaccaataggagatagctagatggatagacacacagacagagagaattcattgtggggattggttcacacaattatgcaggccaagaagtcccatgatatgccatttgcaggccaaagaaagaggaaatctggtggagttgtaattcagtccaagtccaaagactttaaaaatggggactgggggaagcactggtgtaagccagagtccaaaggcccaaggaccgggtggttcaatgtccaaggaaagaagaaatggatttctcagctcaagaggagagagagaaagaggatttgtccttattctgcatttttgttctatttgggccctcagtagattagatgctgcccatcagtattggtgacaacagatcttctgtactcaatttactgactcaaatgctgatctcttctagaaacacgcacacagagatacttagatgtaacatttttccagccatctgagcattctttagccccatcaaattaacacataaaattaaccattatagtatgtacacatatatgtgtgtatgtatgtgtgtacaattatgcatcatttaacaacagggacacactctgagaaacgtgttgtttaggtgattcccttgttgtgcaaacatcatagagcgtactcacacagacctagatggtatagcctattacacatctaggctgtacggtatagtctatggctcctaggctacaaacctatgcagtacgttactgtactgaatactgcagacaattgtaacacaatggtaagtgtttatatatgtaaacatatcaaaacattaaaaaggtaaagtaaaaatatggtataaaagatggtacacctgtatagaccacttaacataaatggaggttacaaaactggaagttgttttgtgtgagtcagtgagtaggtggtgagtgaatgcgaaggcctacaatattgctatacagtactgtagacattacaaacattgtacacttaggcaacactaaattaagagtatttttcttcctcaataataaattagccacttgtaatagtctgttttcatgctgctgataaagacataccgagactgggcaatttacaagagaaagaggtttaattagacttccaattccacatggctgcagaggcctcacaatcatggtggaaggcaaggaggagcaagtcacatcttacatggatggtggcaggcaaaataggagcttgtgaagagaaactcccatttttaaaaccatcagatttcatgagacccattcaccatcacgagaacagcatgggaaagacctgcccccatgattcaatcacctttcactggatccctcccacaccacgtgggaattatggaagctacaagatgagatttgggtggggacacagagccaagccatatcactactgcaacttatttttactttatcaatgttttaatttttaaagctttttcactcttttgtaataacgcttagcttaaaacacaaacacatggtcagctgtacaaaaatattttctttccatatattgttattctacaagattttgtggggggaggagccaagatggccgaataggaacagctccggtctacagctcccagcgtgagcgacgcagaagacggtgatttctgcatttccatctgaggtaccgggttcatctcactagggagtgccagacagtgggcgcaggccagtgtgtgtgcgcaccgtgcgcgagccgaagcagggcgaggcattgcctcacctgggaagcgcaaggggtcagggagttccctttccgagtcaaagaaaggggtgacggacgcacctggaaaatcgggtcactcccacccgaatattgcgcttttcagaccggcttaagaaacggcgcaccacgagactatatctcacacctggctcggagggtcctacgcccacggaatctcgctgattgctagcacagcagtctgagatcaaactgcaaggcggcaacgaggctgggggaggggcgcccgccattgcccaggcttgcttaggtaaacaaagcagcagggaagctcgaactgggtggagcccaccacagctcaaggaggcctgcctgcctctgtaggctccacctctgggggcagggcacagacaaacaaaaagacagcagtaacctctgcagacttaagtgtccctgtctgacagctttgaagagagcagtggttctcccagcacgcagctggagatctgagaacgggcagactgcctcctcaagtgggtccctgacccctgacccccgagcagcctaactgggaggcaccccccagcaggggcacactgacacctcacacggcagggtattccaacagacctgcagctgagggtcctgtctgttagaaggaaaactaacaaccagaaaggacatctacaccgaaaacccatctgtacatcaccatcatcaaagaccaaaagtagataaaaccacaaagatggggaaaaaacagaacagaaaaactggaaactctaaaacgcagagcgcctctcctcctccaaaggaacgcagttcctcaccagcaacagaacaaagctggatggagaatgattttgatgagctgagagaagaaggcttcagacgatcaaattactctgagctacgggaggacattcaaaccaaaggcaaagaagttgaaaactttgaaaaaaatttagaagaatgtataactagaataaccaatacagagaagtgcttaaaggagctgatggagctgaaaaccaaggctcgagaactacgtgaagaatgcagaagcctcaggagccgatgcgatcaactggaagaaagggtatcagcaatggaagatgaaatgaatgaaatgaagcgagaagggaagtttagagaaaaaagaataaaaagaaatgagcaaagcctccaagaaatatgggactatgtgaaaagaccaaatctacgtctgattggtgtacctgaaagtgatgtggagaatggaaccaagttggaaaacactctgcaggatattatccaggagaacttccccaatctagcaaggcaggccaacgttcagattcaggaaatacagagaacgccacaaagatactcctcgagaagagcaactccaagacacataattgtcagattcaccaaagttgaaatgaaggaaaaaatgttaagggcagccagagagaaaggtcgggttaccctcaaaggaaagcccatcagactaacagcggatctctcggcagaaaccctacaagccagaagagagtgggggccaatattcaacattcttaaagaaaagaattttcaacccagaatttcatatccagccaaactaagcttcataagtgaaggagaaataaaatactttatagacaagcaaatgttgagagattttgtcaccaccaggcctgccctaaaagagctcctgaaggaagcgctaaacatggaaaggaacaaccggtaccagccgctgcaaaatcatgccaaaatgtaaagaccatcaagactaggaagaaactgcatcaactaatgagcaaaatcaccagctaacatcataatgacaggatcaacttcacacataacaatattaactttaaatataaatggactaaattctgcaattaaaagacacagactggcaagttggataaagagtcaagacccatcagtgtgctgtattcaggaaacccatctcacgtgcagagacacacataggctcaaaataaaaggatggaggaagatctaccaagccaatggaaaacaaaaaaaggcaggggttgcaatcctagtctctgataaaacagactttaaaccaacaaagatcaaaagagacaaagaaggccattacataatggtaaagggatcaattcaacaagaggagctaactatcctaaatatttatgcacccaatacaggagcacccagattcataaagcaagtcctcagtgacctacaaagagacttagactcccacacattaataatgggagactttaacaccccactgtcaacattagacagatcaacgagacagaaagtcaacaaggatacccaggaattgaactcagctctgcaccaagcagacctaatagacatctacagaactctccaccccaaatcaacagaatatacatttttttcagcaccacaccacacctattccaaaattgaccacatagttggaagtaaagctctcctcagcaaatgtaaaagaacagaaattataacaaactatctctcagaccacagtgcaatcaaactagaactcaggattaagaatctcactcaaagccgctcaactacatggaaactgaacaacctgctcctgaatgactactgggtacataacgaaatgaaggcagaaataaagatgttctttgaaaccaacgagaacaaagacaccacataccagaatctctgggacgcattcaaagcagtgtgtagagggaaatttatagcactaaatgcctacaagagaaagcaggaaagatccaaaattgacaccctaacatcacaattaaaagaactagaaaagcaagagcaaacacattcaaaagctagcagaaggcaagaaataactaaaatcagagcagaactgaaggaaatagagacacaaaaaacccttcaaaaaatcaatgaatccaggagctggttttttgaaaggatcaacaaaattgatagaccgctagcaagactaataaagaaaaaaagagagaagaatcaaatagacacaataaaaaatgataaaggggatatcaccaccgatcccacagaaatacaaactaccatcagagaatactacaaacacctctacgcaaataaactagaaaatctagaagaaatggatacattcctcgacacatacactctcccaagactaaaccaggaagaagttgaatctctgaatcgaccaataacaggctctgaaattgtggcaataatcaatagtttaccaaccaaaaagagtccaggaccagatggattcacagccgaattctagcagaggtacaaggaggaactggtaccattccttctgaaactattccaatcaatagaaaaagagggaatcctccctaactcattttatgaggccagcatcattctgataccaaagccgggcagagacacaaccaaaaaagagaattttagaccaatatccttgatgaacattgatgcaaaaatcctcaataaaatactggcaaaccgaatccagcagcacatcaaaaagcttatccaccatgatcaagtgggcttcatccctgggatgcaaggctggttcaatatacgcaaatcaataaatgtaatccagcatataaacagagccaaagacaaaaaccacatgattatctcaatagatgcagaaaaagcctttgacaaaattcaacaacccttcatgctaaaaactctcaataaattaggtattgatgggacgtatttcaaaataataagagctatctatgacaaacccacagccaatatcatactgaatgggcaaaaactggaagcattccctttgaaaaccggcacaagacagggatgccctctctcaccgctcctattcaacatagtgttggaagttctggccagggcaatcaggcaggagaaggaaataaagggtattcaattaggaaaagaggaagtcaaattgtccctgtttgcagacgacatgattgtttatctagaaaaccccatcgtctcagcccaaaatctccttaagctgataagcaacttcagcaaagtctcaggatacaaaatcaatgtacaaaaatcacaagcattcttatacaccaacaacagacaaacagagagccaaatcatgggtgaactcccattcacaattgcttcaaagagaataaaatacctaggaatccaacttacaagggatgtgaaggacctcttcaaggagaactacaaaccactgctcaaggaaataaaagaggagacaaacaaatggaagaacattccatgctcatgggtaggaagaatcaatatcgtgaaaatggccatactgcccaaggtaatttacagattcaatgccatccccatcaagctaccaatgactttcttcacagaattggaaaaaactactttaaagttcatatggaaccaaaaaagagcccgcattgccaagtcaatcctaagccaaaagaacaaagctggaggcatcacactacctgacttcaaactatactacaaggctacagtaaccaaaacagcatggtactggtaccaaaacagagatatagatcaatggaacagaacagagccctcagaaataatgccgcatatctacaactatctgatctttgacaaacctgagaaaaacaagcaatggggaaaggattccctatttaataaatggtgctgggaaaactggctagccatatgtagaaagctgaaactggatcccttccttacaccttatacaaaaatcaattcaagatggattaaagatttaaacgttaaacctaaaaccataaaaaccctagaagaaaacctaggcattaccattcaggacataggcgtgggcaaggacttcatgtccaaaacaccaaaagcaatggcaacaaaagacaaaattgacaaatgggatctaattaaactaaagagcttctgcacagcaaaagaaactaccatcagagtgaacaggcaacctacaacatgggagaaaatttttgcaacctactcatctgacaaagggctaatatccagaatctacaatgaactcaaacaaatttacaagaaaaaaacaaacaaccccatcaaaaagtgggcgaaggacatgaacagacacttctcaaaagaagacatttatgcagccaaaaaacacatgaagaaatgctcatcatcactggccatcagagaaatgcaaatcaaaaccactatgagatatcatctcacaccagttagaatggcaatcattaaaaagtcaggaaacaacaggtgctggagaggatgcggagaaataggaacacttttacactgttggtgggactgtaaactagttcaaccattgtggaagtcagtgtggcgattcctcagggatctagaactagaaataccatttgacccagccatcccattactgggtatatacccaaatgagtataaatcatgctgctataaagacacatgcacacgtatgtttattgcggcactattcacaatagcaaagacttggaaccaacccaaatgtccaacaatgatagactggattaagaaaatgtggcacatatacaccatggaatactatgcagccataaaaaatgatgagttcatatcctttgtagggacatggatgaaattggaaaccatcattctcagtaaactatcgcaagaacaaaaaaccaaacaccgcatattctcactcataggtgggaattgaacaatgagatcacatggacacaggaaggggaatatcacactctggggactgtggtggggtcgggggaggggggagggatagcattgggagatatacctaatgctagatgacacattagtgggtgcagcgcaccagcatggcacatgtatacatatgtaactaacctgcacaatgtgcacatgtaccctaaaacttagagtataataaaaaaaaaaaaaaaaaaaaaaaaaagttttaaattaaaaaaaaaaaaaaaaaaaaaaaaaaagattttgtgtactatgaactttttttatttttttttacttctcaaagttttttgtttaaaactaagatacaaatacacacattagcctaagtctacacagtgtcagaatcatcaatatcactgtctttcactgtcacatcttgtgccactggaagatcttttggaacaataacgtgcatggagctgtcatctcctataataacaatgccttcttctggaacatcccccgaaggatctccctgaggctgttttacagttaacttttttttctaataagtagagggagtatactctaaaataatgattgaaagtttaatatagtaaatacataaaccagtaacatagttgtttatgatcattatcaagtattatgtactgtagatagttgtatgtgctgtactatttaggattgtcagcacagtgggtttgtttataccagcatcaccaaaaacatgagtaatgtgtaactctgtgatgttatgatagctacagtcactaggcaataggaattattcagctccattataatcttatgagaccaccatagtatatgcagtttgttgttagccaaaacatcattatgcagtgcatgactaaatgtatatctcacacataccacacctacacacctgcacatatatataaatatacatatatatcacagtatatatatgtgtgtgtgtgtgagatatatatgtaccacagtatatacatgtgacatatatatagatatacattttatatatatagtggtccttgaatacatatagcagattctcaaagaacttcattttttcaatgttttttagttataatgtaaatgagaaactggtgttgtcatattgtttcacttaaagtagcagtttccaagaacctgtcaacattaagtgaggacttactctatatatctccacatatctatctatctgtgtatccatctgtatatatatggagatagagaaacagggacagagacagaaaggaagagagagagctttattgtaaggagtgttttaccagacttcagaggctgaggagttccaggatctgtgtagttccagttcatacccaaaggcctgagaacaaggagcagcaatgatgtcaatcccagtctgagggtagaagactaaagacttagctgaagcaatcaggcagaaaagaaattctctctttctccaccttctgttgtattcaagccctcaccagcttggatgatgcccactcacattaaagaggactctgctttactcagtctaatgatttaaatgctaatctcttctgaaaatgtcctcaagacacaccaagagataatgtttaaccaactatctgggcaccccatgacccagtcaacttcacatgtaatattaaccatcacacacctttaataattaagtgctctaaatcctgtgtgcccttactggcagaacagggacactgctggttttcacagcctgtccctccctagttggaatatcatggacagagatagtaggggcatgggagcagtcctgggcaagagcaccacaggctcacgccagtcttacccaaatatagtagaactcaagcatgaatgcttcttacattaatatacagctttgcttgatttccagatttttagcaatctgaaatgattgacagttttgttcagctttatggttcacatttgtttgaggaaatgatttgttagcttcctaattccatcattctggtaaggaaatcttattaactgtgaatttacctagagtgaataaaataacttcttttcaaaatatcaccatgtcatttcaagcctgcaagaaaagacagagagagaccagaaatttatctatcatttcacaaaaaagtatactgaaaagaccttatactttggactcaagtgaacctaggtttgaatcttgacatcaactttctgctatatgaactctaggggaaagaaaacccgcaagctctctgagctttctctgtgaagtggatattatagttggtgttttgaggactaaatgtctgacatatagtatatacttaatggttgctagttttttttttaaaaatctaccctttctgtttttgcttcgcatagataaggtatgttgtatatcaaactgcctgatttcgtttctcgtgtttcaagattacattaacatgtgcatttagttattgatgtttgaaaagtgtatggccggggtcattggtaatttaaaagacacaatggagaaatagtttctgaagcaaccaacacccctctggtttgatgcccaagaatgcagtccttcttttgtgtttttacaagccttctgttgatttatgtttgcaaatgtacttttggtcattttcttaggcagtaatcccaatgtctttctttagataattattgtatatgtatttttttgcaatattttctaagtgttaaaaggaagaaggaatgaagaggataaatgcatgttagtttttgtgggatgaattccagatcaacttcttctagcaggctaatttttttttcatttttcttttggtcaattgtaagcattgacatcattatagtattctctctatttcttctttgaattactcactcaaccacacctagctactagattagtatttcagttctaaacactgattataactagaaagtaaggcaaacaaaataatgttaaacaaattataatgtagctacagatttatgatactcatttttctggatcctaccagtacttattttgttttctttatatacccaaatacattgtaaatttgataacaaaaatcacctttcctccatgtctgttaaatctcagtagtaaaagatatatgatatattttctccttgaagtattgcctttcttgtagtggaaagtgtagtgccagacatcaaacatcaaccagttttatagaaacaacactggaaatagaatagacataagatataaattttgctttgtcattcagcagctgtatgatcttgtttaagtaaatcgaattctttgaattatggttcccccatcttcaatgatgtggtggcttaaattctaagctttttattggtgctaaaagtctataatcctgtaaccactggatattagtctaaaatttgctgatgccttctctaaatagtttctaaattaaatgcttttatttttgtttgtgtattcgcactgaagattggctaatatgtttgtttcactgggtgttgaatgttgtttttggagatgcgatttaagattccaggaagctaaacttgtttctattgagattgggacctcacttttcttatactctcattttatagtgatcattataaacctctccattgattcattttctatgtatgtatgtatatatggatatatgtatgtatgtatcttatgtgtctagttttgtggttctgatcttaaaaccctagagtatcttgagatctattattttacttagaaactattctcctgtccctgtactaaattgtaccccacccacccaaatacactgaaagtgttttacatgctttcgatttatattcaatgagtagaatagccatagggaaaataagctactggccagactctatactgaattattctattagttttgctcaatcatgactccagatttaggagttaagctaaaaaatacagttcttgtcatattagccctcagtattcagtgtgaacagtgagaaagaaaaagagcacattggagcccccacccaaagaatgagctcgtttgcatactctaatctcacatagtcttaatttcattaacactttcattttggcagcttcacacacaacagtgaaagacataaaatccacaattttagcacagctgtttcctccttccttcacaaagttatttaaacacctcgtgacacaaggggaaagggtggatggatgacatttcaatgaattatctcctgtctgctgtgtcatttcagaaatacttactaattggcagaataatccttcaaaattacctttcaagatctggatattttaacaaactatacttattgtccattcctatgtttacattcttaaatccccaatatccgtagaagcagaattgctaagaaatgtagactcatgcaccatgttaaaaggcaaagaggatttaccaaatactgtaaaatccctaggaaaatttttttttagtagggagcttcaggatcatgtccttaggatttagaattttaaattgtgctgtcaaggaatttgtcttttcatctttttttaaataagtagtaagatatccaaatatatgtttgaaataccattttgaggatagaaactccacatttgcattaaagtctaaaggaaattgaattgtactttggtgataagaacacctaacaggtcacctgctgataatgccgtgataaatattatttcaatgataaatatttcaaaacagccacattcttcctcttcaaccataacacacacacacacacacacacacacacacacacacacacacacacacacagacacgagtgggaaagggagggaaaaagagctaaatctttctgatataataagtaaatttgtacaatattaagatatcaactttttggacaaaagaaagcaggagcaacaatttatcttaggttaggtatgattttacatatttctttcactaataaacaggcatcttgaagttggagctgtaatagtaagaatattagactaaaattaactctgctaccaactgtggggtcttgaccaattatataaatgcctgagtcttatttttttttcaacttgaaaaaaaagagacactattggtgatgtttgcttagctacaaatagctttttttttttttttttctgttcctgttacccattggagtatgtctccccatccaaagtagaacatagttgattggatgaaagtagcacttgacaaaagtggagctggtagagacctactccctgtgaagcttgaaatgagggctctgaggttatctccagcctgggctgctatcagaagagaggcgaggaagggttcctgaggttgccgtgtcccaattctgagatggtatggcgtctcatctcaatttaatagcagcaaaaaatgcctatctgtaaaaaagtgaaaatgagaaacaagtccagaaaaataacaaatgtctccctcacctccttaatgtttctattgcttagttccattttgcaacattctagttctggactcccaaagatactcttattttttattttaaccttaaactagttacacttgattcaggttacactatatttaggttatttgataataacctaaatatacttcgctaacacaggtcattgtagaaaataattaatcgctttgacttaagtcagtttttataaatgaaaataaaaatgttatacatagtggcaattttgagtaacaagttctaaacaattaatagttttatcaataacttgcacatagtaagggttattgaataattcttaaatcatgttaatccatcttaaatcatattaatccatcagagttataatttaaaatactatatttgggtagaatatcttgaaaagttacaattaattggtaagtcaaaccacaaattttttggggaatgctactttaatattaatctgatctatgtctaattgctgtgacgagtactgaatccttttcttcccaacctacattccctgaaatttctgcttttaaaatctgtagaaaggcgacatatgatctttccaattggagccaccatactgttggttaggcttttatttcttgtatagatttagtctagttaggtttttatttcttgtgtcttttattttataagatctattttctaggtgttacattttccaaaagagtaattttcttgtttttgttttgttttttttttaacactcctggcctgtctggtattgttctctcttgactagttacctgtatatttttttaaaaagttattttaaattcaagtttgtgggctgttttccattgtttgtagatgacacggtgtagtggaaacgaacataggtctctattatttcttttttctgcttcagaaatgacgttattttgaattcagttccctagttagccatgataacatctaattcaaagatgatggatcttcgcagataacaaagtcagtgtgttaatttgagacaaatttctgtttcagaggactggggtaaaatgtatttacataggttgagttctattgtcatctcagcagtaattcatgtggcatcataaaatctggattcatataaacattagtcgctaaaccatagactttctttttcattttatgtaagtacaaaagtcttgcagaatgtgttctaccaggaggcacctttctatactgccaggtcaccacttgttggaagagagaacattgagataattctttttactctaaggcataagaaaacaatttttttttctttcctcctctttcttgaatattggctacaagtatgtacatttagccaagaaggaattgaaaatatctttctattacattttttccacatctgcaagtcctatgcttagaagatttaattttaacaagttttcctcttatcgtgaacaggttataaaagaagccaaaaattaaagtctagttaatatcttctcaagtagaacacaggctttttttttttttagtttctgtgaatgtatttgctttatagtttaacttttatttcaagtttaggggtacaagtgcaggtttgttacataggtaaacttgtgtcatgggggtttgctgtacagattatttcatcacccaggttttaagcctagtacccattagttattttttcctaatcctctccctcctcccctcatctgccctctgaatggccctggtatgattttaaaatttcattatttccttcttacctgccactttccaagactttcgtaacatcttttcttgatactttgaaatccctatgattctttaaggtccaattacctccatgaaacttttcttaaaatttcaaaccaacagctgtgtcttcccagacctgaattatcatggcagtgttaatggttctcattcataggtactaggttagataaaaatttattaaagggtgaccccattatggctgctgtttttgacacattataatttccagttcacttctggtttatctaatttggtaaaatttaaaaaattatttctaagatctagatgactgactagaggcaccctgcgtgcatctccttctccgcaaagaccaaaagaagaaacagaaaaccacaggttgaattgagtgtctaggggagaacactgaaattcagcaaggaagtgacaagactccctgaggcacaaaaattcaaaatggcagcatagttgagggattccccatcacagggaaaagataagcaggagattcacagaaacccagttcctgccacagagacaagcaatcctagttatgggtgagaccctcaatgctcatggccctgggaccagtgcagggagctgcttgaagttcatgcaactgcatttcttcagagaagaaattcatgataggccttcctacacccaggatccaggctgctgtagcacgtctgaattttgggaacagaagcaccaccagagtgcatcctaccctgggcccaatatctccttcatctccatatttttggggccctaccagcattccttcacatctacacggaaggctgcggccttgtgaaaccagctggacgtagaggtacatctacaacaacacttgagtctccacggcactctacacctagggaaataggtggtccagcacagcagggaggctgccccaagtatagagggagccaacacctggctccccagagcctgagagctgcctgcccagagctcaccattgccagccaccaaggccccaccctccagtggcagacctactacacaactgtgtgtgtggttgaaggtccaaggactggcttatctgggcccaccactgccaccaccagtattcacatatgtcacccagtgacctaaagatcaacttacctggagttctccaccaccgttgcctgcaaacctgccacctccagtggcaggaacattgcatgcccacacacactacccagaggctcaaggaccagcttctcagggcctgttgccacaccgccagtgcacatgcacaccacccaggggcacaagaagttggatgcctgggcattccattgcaccaccagcatgtgcatgaaccaaacagtggcttcagggcctgctgccgacactgccagtgaacctgcccctccagcagttggactgccctgcatcctcatgtgacacccgggagcctgaggaccaacctaccctgggcctgcactgccaccaccagcacatacacatgccactcaggagcctgaggatcagcctacttggcattcccatccccagcaaagctgggccacaaccctcaccaaaaaaccagagcttaggccactgtgaggcattaacaaacattattgacattgactatagctgaaaaaattctatggataccacattactttgtctacccagaaccaaagcaaaaacatcctacctaacagacaccatgaaacacatatacaggaaaaaatctttccctaaaaaacctacctcatgaaactggaagaaatgactattacatcagatgcataggtgtcaatgtagggttataagaaacttgaacaagcaaaagaacatgacaattccaaagcaacctaataatttctcaatgatagtccctaaagaaaataaaattataagatgtataaaaaagaatgtaaaataatgatcttaaaaaacttagcaagattcaagagaacacagatagacaattcagtgacaatagaaaaacaatttataatttgagaaattcaacaaagatatatatatatagatagatatattcacacacacactatatatgtgtatatatatgtgtgtatatgtgtatatatatgtatatatgtgtatatatatgtgtgtgtgtgtgtgtatgtgtatatatatgtgtatgagagagaaagagagtataaccaatcagaattcttggaactgaagaattcaaagaatggaataaaaaataaaattgagaatttcaacagcagcctagatcaagcagaagaaataatttttgatcttgaagatgggcccttagaaatagcacagtcagacaaaaaaagcagaaaataattaaaaaaaaaaaagagcctacatgacatatgggacactattaagcaaacaaatatttgcattttgggtgatccagaaaaagaagagatgaaaaaatgtgtagaaaactgtattagttcatattcacgtggctataaagaaatacctgaaactgggtaatttgcaaagacaagaagtttaattggctcatggttccagatgctgtatgggaaacatagtagcatctgctcagtttctggagaggcctcagaaaacttacaatcatggtggaaggtgaagggggagcagacacattacaggccagatcaggagacagagagagagcaagggaggagttggtccgcacttttaaataatcagatctcatgaggacttactcactattatgacaacagcattaaggggatagtgctaaaccattcatgagaaattcaccctcatgatccagtaacgtcccatgaggcccagcctccaacactggggatgttaaagtaaactatggcctgagaaggactctctacttctatagttgagtccttgtggacgaacggcaatctcacttaataggtagacaaaattgaaaacttaactgaggagtatgcacctgtaacaatagccgagtcttggccattccgagtggccgtacttcaaccattcatacacttttaagtgctcaaactgtgttcaaatcaggtaaatgccaccctgtaaccggtccagccattctgtacctcatttccaatttttgtatgtcctttccctttttgtgtctgtaaatctttttccagcacgtggctgcactggagtctgtgaatctgctgtgattctggggctgcctaatttgtgaatcattcattgttcaattaaactcctttaaatttaattcagctaaagtttttcttttatcagggattactatttgccatgagatttgggtggggacacatatccaaactatatcaaaaacctatttaataaaataatagttgaaatttttctaagtcttagagagatataaacattcaggaacaggaaactcaagattcccaaacagattcaacccaaaaaggtacagtctgagtcacattatagtcaaactgtcaaaattcaaagacaaaaaggaaattctaaaaacagccagagtaaagtgtcatgtcacatgttagggaatcccctttgatataaatccattctatttaaggctatctatgcttttaagagtaaaagaaatagtcttagtttttcatgaaggagtgaataattaatacatttattaatgcataccattaattctttagtctgtgaatttggtatttaaattagtatatacaagcaaaagagttgagaagggaaaacagactatcaaattgtaattgtgtgtgtgtgtgactggaggtggaagtttgaaatgctctttaaattatttttattaatagaatattatcaggaattagaagaaaaataaagttggaacattgaactctttcccatgtagcaactttaagatcattatgaagacttaaatggaaaataacttactaaaaaggctactctacgaaaaaaatgatgtggacacttctactctcggtatattgagatggcaactatgacaacagcataggagcatagtatttttttgtttttatttttatgtttttttgagatggagtcttgctctgtcacccaggctggagtgcagtggcgcgaccttggctcactgcaagctccacctcccaggttcatgccattctcctgcctcagcttcccgagtagctgggactacaggcacctgccaccacacccggctaattttttgtatttttagtagagacggggtttcaccgtgttagccaggatggtctcgatctcctgacctcgtgatccgcccaccttggcctcccaaagtgctgggattacaggcgtgagccaccgcgcccggccaagatgagtaagttcttatttggaaattgctgagggtaaacatgatcatcttgagtaaaagggtaaaatacatttctcagcaccctatttacttggtaaggaataagtcaatttccaatgggggatttcagaagaccttagttatcaatcacaagagtgtaaattgtcctgaagtatttcctctcatggtaaaataatttgaattctgagtcaagggaaaaatagagatgtattaaaggaatttaaaatatggacattaatcttaatttcatatgtgtatttcaggagtgatgatctaattgcttctttattatagtgaaaggttatctctagtttgtactgatatgaagtcacaagcactgttctgaacaatttgctaaatataagctgctgatactgacttttgtgatctaatagagggcttcctccatcgcaaaatttcagtggcttgctcttgtttgtttgtttctccaagtgctttgcgctgcaatgactgaacgtgttacctttgtacatagtgggccaagtcaggggaaatctgctgtcttatgattgtcttattgtatattattgctgcacaaaaaaaaattattattctgccttctggaagcttttcctaatgaattttaagagaggcagtaaatctttccatcacacttcttattaaaaagcaaatagataagttaaataattccagctttatctgtcattcccacagtacatattgccactgtatttatgagcataccattagtatctttgtatgcaaagaatgttaatgtatgagaacatgaatgtaatacttttataagctgcatgttgattctatacatttcctggcttattgctatcctaatataattttaaaaaaaggaaaagtacactcccaacactgtataaagtagttctccaaaggggtgattttgctatcaaagggcaactggcagtatccagagacatttttgattagcgtggctggtgggggcttgttagttatggacatctagtgagtagagaccaggcatgtagtaaacttcctgccttcctcaacccctcaactcccaacaaagaattatctcatcaaaaatttaaacggatccatggtttagaaatcatactcccaaagcaaacaaacgtttcttttcgttgccttaaagtgttgcattctgttttagggtgtgtgtgtgtatgtgacatttgtcgctgagaaatgtatctactaaaggtgaaatactttagacttggacaaaccagaggcaaaacatgtcttcccaccattgtctaatgtaataattgaaattactaattttcaaaattcaacttattgagaagaaataaagattatatgttatctgtagactattaaaataatgcattgtttcatcattaagtattaaaggagactacaaataagaacaaggcaaatccttatattcttgtctattattcacaaaatggtatttttctctaatggctaatatctgatgctggaaagaacagtaagaaattttatatttctctttacttttagaatttaattctcatagtgacctcttggcttaactgaaattctttcttgattaggggtccatctgggactatttataaaataaactgcatttcacaagtcctttgtaaaactaatatataatgacagaaagcagcccagtagtgcgttgggctagtcgtgggtggaaagtcactgcagagaggcataagggagctatttggaatgatggagatattctatatcttggtaagggaggtgattgcacaattgtacatatatgtcaaaactcattgaactgatagttaaaatgggtgcaatttggtgtatgtaaattgtataataataaagaaatgttttgaatctattgaggcctagtaagaaaaatatgtgatgtcttcaacttatttgatttatcttacagaagcagataaatgaaggtcagaacttctatacattaaatcaaatattctgatctgaataaaatggccttaggatataaagactttttaagtcattacatatacattactctataacattgcttgaccaatgcttattgcattgtttgaccattatttatgattataaataaatgttttctgactaaagctttttgcaaaatttatctgcacacaagatttcaggtaccttaaaaattttgtttgtaaatgtaaacttaaatattaatttacacagtgtggttttaaaaattgtgatgatgtaaatacatagaagcatatatacaaagaatgtgtgcatacacatgcacacacatttgaaaataaatgcacagaaatgatgacacggcttctaattcttagtgtaggaatttcaggttatattttgctgtcatatttttattttcctctgttttctaaatttgccatactaaatgatcatttataatcagtcaaaatacatattttaatattctttctatgagtagagttttatgcactaaataatattaattttaactatccttatacattatttgtgattctaatataaaaaaggattacataaaagaacagaaggatgtatttattcagaaataacacattgtattaatccattgaaaacaccccagagaagaagactgaaactttgtgtgttcttttagttttcatagtaaatggaaattttttgtagtcattgccaggaataaggctttgtaactttgagtttggcacagattaaatgatacatatcactattcaaatggtgctggaaagtttgaagattgttttagatggcttttacaagagtgaataaagtatcatcttatcacagtaaacaattgtatgttcattctcttgaatgagtacgcaggaaaccatcaagggacacttctggcctggcagctcaactctccaaatttggcatagtaatggctattcctcgtaattgggccagagtgcagggaatgggggaatggttcacagtaagggacatgcacttggcaccgtttgggccatttctcaacatttcagtaagtagaatgcctcatttctctgtgtcgacagtcctgagtaacatagtagtacccaggagatcgtttaaaatctaatttttttttaaataggtagtttttccaggcaagtgtagcattttgcattttaagtcctgtcatcacccagaggaaaaaaatatatgatgtatttcctttcatgcatttaatttcaagttcttgaggtcattcttttttccaaataatcactgggtgcagtcactttttttcctaagtttcaacagctcacttaaaagacataccagattaaagaaatgctaggatttgcatttttttctaaaactaagattagtattcactgtatgaagttgatagtcaacagaaaaaaaaatcatccgagggtttctaaattgctgaataagaacatagaaatttttaaagtacattttgaagttttgagatgtagcttacagcaaatagaaaacagaacgttctcaatttaacagagatgccgacctggggtcataatttcttgtttcaatttgagcttctgccacaggtcagctgaatcagtctgagactatttactcacaagggtaccatgagaataatctatggtccctataagtctttatgttaattacaaaagcagaatagtgggttttttttagacccatctctttaggagccttgaactatttgtgataagactataaatattggaaccagaggacttaatcagagtagcaccaacttggccaaatcatgttcttgaatttcttcctttgttctcatatgaaacatgcagataattgttgttagatgcatagtcagcaaataattgaaagataaactttcctcaaatacacacacacacacacacacacacactcacacacacatgcatactcccatatgttgcatatattaccataactcttaagacaatgaatgagaatggatctcaatatatttaaaaatccttaatactgggacctagaaaaaatgccatgttaaatctgtaagcattctctctagcccaagaaatggaaacttgaatttattttgggacacctggcttgcttgtgtaccatgaaactttcacctcaataggattttagttacgtaagttcaaacccagtacatgccagttgatttggagtgaggaaggtgctgtggtctgaataattatgtccccacaaaaatacatatgttgcaattctaatcctcaaggtgatggtatcagcagtgtgacctttgagaagcgatttgatcatgaaggtgtctcctaatgaatgggattggtgccctcctaaaagtggaacaaaggagcttgtttatccctttctaccacctgaagttaccgatgaccttcaccagacactaagtctttcaccaccttgatattagacttcccagactccagaattgtgagaaatatatttctgttgtttgtaagtctatggcatattgttgcagcccaaactgaccaaaacagagggtactcaggacatattatacagagtttctagcactttaagttggttatgtttatcagaactaagtctgcacaaacatttttcctcttacttgatttgcgtttcctttactgatattatattgccttttttaaagggaagatcatgattatgagcatattatacatttggtcatttgtgattttgagcagagctgctgatacacaataaaaaggaatgcagtcctattgatcctctcgtacttagaaaaggatagcagtccgcttgtaacagttcaaccttattgatatatcatgtgttgttacaaagtttgcatagtttaattttgtgaaatatgacaaactattgcctcatatgtaatagtgacctattgaaggccagagggcaggactatctctttggcttagaaatgggcttcctcagaaggacataggtattgcaggctttaaagctccccatcacattcctcttgaagatgatactggctctgaccgtaactgctccttgccctaaatatttccacacccagttgcagctatttattcatctttgtcattgttgtttgtttaaattttacttctgtatttgataaggcaaaaatatttaaagatgcttcttgtgttgtggggttatgtagaaatgatcctggtcttgtcccaggggtcatttgggtacagggaaaactggagcagcatgaagaaagacaaaatacaacatttgaaagagaaacagccagttaaataggacacatgtaccatacatgtttatgttgtctcccccaccactagcctctttaaaataatggcaaaacaacataaaaagaaggaataaccccacaaagacaaaagggaattgaagtagactcaactacaattcagaaatttcagcagactttgattaaatcacaaatgcaggagaggaactgactcagcagggaataagaatctacaatattaggtgtctgatgggaatttgataaagaagtaggccaccagaccctaaaaagctcatgcaaactcagcctcttagagaaaacaggtaattcctagggtgagttaaggtgtaatactgaatatatagaaagtggttgcacttgacagaaaacctttgaaattccaaagcttgcagaatcaggtaatggtctttcgccctcctccccaacccaaccctgaccaagaggctagagtttcatatttgaacaaatctgagaggctctaagaatgcaggggtggaactcaaatccaaaaatggagaatcgtgacatagtgaaccatagtctctgtggtagacagaccctgagaacaatcctctctccctaataactactgtcttctagtattagcactcttgtagtacagttgggacctgcaactggcttctagccatttgactacaactaaggcaacctaggtatcattcttggcacctagaatgggtgtcaggaataagtctgagtcctgacacagggattctggtcagagcactgaaaacactagtttctcttagggtcataaaatttaccacaatttttagagttgaatgaaaacttgatgtagagaatggtggcaagcacaatttttgcatactgattaaaacaagtgctctatgacaaaaatgatatttttaatcttagatgaaaagtgagtcagatatgtttatgattaagtgctgcctgtttcatataattcatattttgtaagtcaaattcaccaagaaacatactcttagatgaagatttgtattcaaaagatttactggggacatctcttgagattgtcacctgtaagaaacaaggatagcaggagtaagcagaaggcaagttggaaaagagatgtaggtacaacaatggcttccaccaaccccacaggagctccaaagcctgaatgactccttaaagatgaagaaaagggctgagcatgatggcttatgcctataatcccagcactttgggaggatcaagtagggggattgcttgagtccaggagttcaagaccaacctgggcaacatggcgaaaccccatctttacaaaaaaatccaaaaattagtcaggcgtggtggtgtgaacctgtattatcagctacttgaggggctgaggcaggaggatagcttgaatctgggaagtggacactacagtgaactgagattgggccactccactccagcctgggtgacaaagtgagactcagtctccaaaaaaaaaaaaaaaagtgaaggaaaaggaactcttgcacactgtgggaatataaaagagtatagccattatgaaaaaaagtatggatttttcttaaaaaattaaaaatagaactacaatatgatttagcaattctactattaggtatatatccaaacaaaatgaaatcagtatgttgaagagctatctggattaccatgtttactgcagcataatttacaacagccaagatgtagagtaaacctgagtgtccatcaacagatgaatggataaatgaaatgtggtatatacacacaatggaatattttgaagccataaaaagaagcaaatcttgtcatttgggacaacatggatatacctggaggacattacgttaaataaaataagctcagcacagaaagacaaatattgcatgatctcacttatgtgtggaatcttaaaaaagctgatcttattgacatagagaatagaatagtggtaaccgggggctggggtggttgggggaggagggttagagagatgttaattaaaggatacaaaattccatttagataggaggaagtttgagagatctattatacaacatggtaatgttttgggattttggggtgttgcttttctggttggaagcctctgtggctggtggcacctttgccagagctcttgtcctgcatccgagaagaatgaagtatgcggacaagtgaatagtgaggaagatgaggagaagctttattgaatgttagaacagcccagaggagacctgtagtgggtagctcctttctgtgggcaggtcttcccaagtattcagctctcagcagagagggcagctcctctccacagctggccatcctgttatctgcagctctcagcagagaggaggccctggagagggtagctcctctccggagctggttgtcccaatatctgctcctctcagcagggaggaggccctggagagcgtagctcctctttgcagctggtcgtccagatgtctgctttgctgtggctgagcctggggcttttatgggcctcagaggggtggaagcacatgccacttggtccatgggcatgctcaaaaggcaccacaagttcccactccagtctgcaggactggcagcctggcccccagccccttcaggccctccctgggctcaaggtcaggcctcactggggaccacccacttttgcccaggagcctgtctgcctcctgccgctgtccgtggcacccaggctgcttgcaccaaggggcacctgcaggccagtgcctagctgccctcaggtacttcccacgcttgttggtgcccaaagtccagagggagacgaggcagctgagggctggtgtctcagcactatcttgagtgtgtgcctacccagctgggctgtgacaacactgggcttggccccaaccttgctccatgatcagagtgggcacctggagtggagagaggccagactgtgggagcaggcacttatgaacctgttgctggggggcaagggggtccttcctggggccccaagagcacagaagtgtctggatccacagctgtgctcggataggctgcagctgcacccacacttggggagttcctgtccagccaacttagaagggcagggctccctcttgtccctggctcccacagggtctgtggagtgtacagctctgaccatgcctctgaaatcaaaatgggcactgacagcagggagaaaccaggcaatgggagcaggcacttccaagcttgtggggggaagggggggacttcccaggccccccaaagctcagagactccaaagtctggagcccaccagggcatcttcagtggaacttgaggaggacgaggcttctgcctgctcagtggagagtgggggcccggccatgcctcccgtctgcatccagcgtcatggccattccagatggcccgccgctgccgtcagtagctgtagttaatcacagcatattatattcttaaaaatgctaagagagtggatgttgagtgttctccccccaaaataatataataattctgtgaggtgattaatgcacatgtcagttagctagttttagtcatctgactttgtaaatatatgcttcaaaatatcatgttgtacacaataattacatagaatcttacctgtccatttaaaaaataaaaataaataaatttaaaaaaaagaaaagataacctgaagtcagggcaaagagagcagacctactgcatagataaatccctggaatgagctttcccagggagaaagtataaacttgggtgaggcagctctcttcagccaagggccatcctgggaaagaactcagttgttctgcagtcatcgcatccaacacctagaatgaagaccaggaatatgtttgggtcctgaatctgggattctggtcagggcactgcaaacatgatttcattaaataatgatcctcttatcttagctctagttcttttaactattattttatttctggctttttgaagcagcatagattataattgactcttccttattgacattctgttaggaaagaaacattttctctatatctaattatttctaaacatattttcttatggagtatcatcccttatcataagatgtttacaccaatagatgcaaacaaatagtaaatagagtatctaaaaggttactttgttggataaaatattttattatttgtgtttttagaaaagggatctgctaagaatatactttttattacaatcaaacatgaatggaaaaagggagaaaaagccctttgatgtttcttgagtaggtaaattcaaatcatgtatatactagctaagtcacagagtcccataagtggagtcataaaaagtaggttacatttcacagcaactactaaaaatctcttaaaaccaagatgtctcaagggtacatcttgtaaactagctgtaaagctttcatggtaacaagatatggaacaaatattaattggataggaaatgactccaacagggattttattttgtatgcctagtgttttcaaggtgaatagtttgcaaacgtttctagtttttaaccataataagcaggctacagctcggggctttacctctttaaagtgcctatgccataatctgttttcttaagcatgtgtgtgtgcatttgtgtatgtgttttttcattctggcttcagtttgatgatctctcagcaaagctaaattaatgggctaaaagcttacggttttctgttacataacatcacgtgattctcaaactaaagagaatataataaatatttactttaacatagttaaataattttaggtccagataatagactcattttctactcttcttgttccttgcacactgtcttcagttttcacctcactactttatagattaactatttgaaacaacaacaaaaaaatacggctactgacactatcaacttaaaatagctatacatgatattctttcaaagacaacttgatcatatcatcaccgatgtcttggatcatcataaatagcctgaaacctgaattccaactgaaacagcattagttccaaggtagattactggacatagtaatctattttattttccctaaagagaaattggaatttgatttttatttttaattgattgaaagaagagtttcatattttttctcaaatactctgaatgcattgatgaaatactgtcaacagctggtggaaaactcccaccaaaaattagttccatagtgaaacactgcatttgactatttccaagaatccataacctttatcttgctgatgatagggaattgagcactcgggatattgagataaaataatttcctaggcgttgctctaggggggaaaatatatttccatcgggcccagagttgttggaaagaaaacaaagataaaatttcctagtatattcttctcactcctaaaatttaaaaatccacagtaattctctaaccccttacactgttttattttgattcaaaatatcttatttatattatattgcatatatgtatttatttgacttattattgttttctcgatagaatataaattctagaaaaaggagaaaccttgtcagttggtttaccatggaatctccagtacccagaatggtgcataatatattgaagatgcataaaaaatacttattaaataatgatgagataaattctgatctaaattattcctgccatcacgtaaatgcacatgaacatttagcctcctggtaattttttatataccattgatgatgagcatctggctgttagaaagtcatttttttacaattactaaattgtatgctgataagaattaagtcctattaaggactttttgtatttacgttggtggctaagagctcaagatctgaagtcagaatgcttcacttacatattaactccactgctaactagctggtggcattgagcaaatcatctcatggaatggattttgtctgtgccaccaacaagatctccttttctgagccagtgtccccagctactgtgagcattagccactaataccacaaagctgccccttctctgtagaactgccttcagataagtgagagccatctcacctgatggttgagatggcgacatataagactagtgctcatgcttcaaattaagtccatctctgggctgtaatttatgccccagaaggccactaaggatcatgttaaaattcatctctgggcgacaccacattcttgattggctcttttttttccttcctttcttaatttgttcacccctgttctgagagcactcctccataaattacatacaccagaatccttgtttcaggctctctttctattcaataaaacctatatgacacataacttctccatgccttagtttttgccactctgaatttgggagaaataataggtttacttttattataaatacataatatccctaaataaatgtaataggatatgatgatcatcacttttttgttctctatgttttcttgcttttcttctaggctgtagaatttaacttttttttttcattgactcttttccaccttagtctttttaaaaaaacactcttatttggataatgatgatgcatccaatgtttcaacaatatgataaccttccaatagatttagacttttgctatcattgggaccttaacgttgtcatttcacaaaattattttctgagttcccaacataggtaaattgtatatcatttcctgtgttctccaagaaatggtctagaaccaaccaccattggagcatgaactcattattagaaaagcgtattaccctgacaattagaaaaaaatacatatagtgagctgcagccaagaaagtaattacatttatttttatcactggaaaacaatgagtggcagaaatgtctctagtgggcttgaactacatatatacagcaatgtcataaagtaattctttatgtccagcttgatttatgttcataagaccaaagacataatatgagcattatcggaaaaatgagttttaatagcatggagtctacaagagattccccatagttgaatttcttaatatctgcctttggtcagcttttggagatgttaaaatttgagccgctcagtgtgctcttttttgacttcttctcaatgtaaacattcaaataagggagcaactggatgtgtttggggaggtttttttttcctacttttgttttatttttcaacagatgtgagactacagccatcatcaaaatgtcaatataagcaattttgttagatcaatggacaataggaattttagatccatatcactacaattgtaataccatttgtaatgttacttcttattagaatttcctagcaatcatcattcatctaatagagggattttttaagaatccaagaagaacaaaaatattcataagccaatagaagcaaatggtataaatgatatatatttcaccacaaaaaatgaataatgcaccacttcctaaatcatgtgcagtgactacattttatttgagcaatgaagaggcattttccttccattttttcttttggaaaaagtattatgtgagattatgtttttttttataatatgaaaatactgaactacttagaagtaataagatacattatgttttggtttaggttaaaatcgtgcagttattgctaagattaattggtagattaagatggagagctaaatgagaatttaagcatttgctgcttattttgacacgtctttattcttaggcctctgtacaaactcttattcccagccttctaagtcaaaatcctttaaaaagatcctctgcttatcacatacagtattcactttgagacttaatctattttttcttatattatcattttaataaaatattgataaagcagacacagttgatcttatgacagtcatcacatttatgctttgctttctgtttttaattccccttttatatattctgtttttaaaaatttttgattataatgttttgtttgtggcttttttctgataatttggaaagcattttaatagttaagtataattatatatagtacattatacatgatgcagtttatattctatatctttacacaatatatactgatttcttctattagcaataagataaacaatatttccatttagacatttacttgccactcaaatcttcagttatttttgtgttctattttataccttaacatatacatcttttgcattattgatcactttcagatgataccaggctaacctaataaataaaacaaaaaatattataaatgttctcaaccccaatttttcccccaccccctcccaacttggttttcatttcattgtttctgtgctgtttggtctatatctactttctgtctataactacaattgtccatttgttttaaccttgggactatagttaatttgaattcagtgctcacagagagtatttttgacttaaaaacacattattcatctttttattgaccagtgttcatttttctttcactgggcatggttaactctagatatgattctctaaactgctgtagtgatgatttgtctttgttggaaaccttcctaaagacaagctgacactctgagaatggaagtgtgtcagatgagctggaaagaatctgacctgatattgttgaaaattgatccaaccccaccctaggattttcttatttctaaattgttggtgatttttttttcggtctttttattcaaaccaatttgaggtgtgatttttttctttacatgcactgatgtaattatattttctggaataaattgtcaagactgtacaactgataataaaagacgatttacagatctaggtcttttgtttccaaaagtttatgttcttcacattaattaataatattactcatttagatgggatgtaattattttaacagaagtatttcaatttatcttaccaaaatacatctttatccagtaaaataccactttttacgtctgttcacatttgcttcagtagaccttaaatttcttgtcaacttttttatcacagtttgtttttttcttctcgtgcatttcccccagaaaagtcctacaattgcaaaatagtgctttattttgttttccagggagacatattctcctatcgtcattttagctctaaaataaacttactgaaagaatgtgcataaagcaagtggtatacgaaactcagattttaaagatgtttgtttgcatttcttgtttatgaaagtgttattctggagaaatagacagtagtgcttagtccgtttactttttaaatattttcatgttaatatgactaaaaacaatacagaagtttatggttatttcagatatttgataagacagttctttctagacatgctagttttaatgaaggcggcagtgaaaaaaatcctactaattttttaagttaggaaaaagcccattatctgtattttgttgtaatcctttgtaagatgagaaaaatttaataatttaagcgtatcttttaacttttaagatatcctggacaaatatataaatcctggacaagatttatatattggtttttccttttcaaatcacataaagtatagaacacttaagtagcccacgaattgggatatcaaaggtagagaaatgaaatttatttactggctaaatggactcatcaacaataagcaaacatgtacaaacttaacattagcatctctttggacatcacaatgtcttaagatttatatatcttaaggagggtcattggaccctcctttcatagttatgattaggtaaatgattttatcacaaatattaaaaaggaataactctggtaaaatttatatgaattaggaaaataatttacagaatgcaggaaaatatggtctggcattgtgaacgtgaatttttttatcttttaaatttaaaaagactttgctttctcttagcctcttcatctcagttttatgggtttggaagggcacatatgttcttttctatcatgaggaaatttaactttgtcttgtttttcctaagctttttaaatatgtaggacaataacatttgttgctatgagctttgaaatgaagatttataccctgcttttggaggtcagaatatatcacccaagctcttatcaaaagccaacaaatggaaactctatagcaacaataaaactgaaccttcattattctcttgataaaaaaaaggtatatatgttctctgcacttaataatttcactgttctactaattgcagtgtccaactcttgtaataatctgatacagtggctaaatttttataggtagttttagaaagtaattatgagcaaatgtgtgaatatcaatatacactcaatatatggaaccaaatacattttagtcatatttctattaaaatagcaattgttttagaaaaaattaaaatactcttcctattctcctaatatatcatctccatgttttcactagtgttattattattctgattttgagatattaaaataaatgttatacagccagatgataaattgttttatatttttcatccacaaatttttgttgtaataatatgatatatgtacagatgatttatgagacttataggatgtgacggcaaatagtgaattcatcatcccacacactgtaagagctatggtgattggtgagacaggagatttttttaaagggaggtagaacaatgatttaaattttaaaacttagaactaagagatctgtctggaaaggtggactggcaagagtaatccacttggaacagggctatgtacagtaggtgggagaagcaaagaatgaatctctctactaggatctgggcttcaaaagaactgaataattaggactacatttacatttgaaataaaaaatactctcaataaaatatttcatattgtatgctaaaattcaaaagactgaccataccaattgttggcaaagatgtggaataactgtaactctcattcactgctgctgggaatgttaacagatacaactacattggagagccatttgatggttatctaaatatttaaaaattagtttgcaatataacccagccattgcattccttggtatttacccaagggaaagcatgtgtccatatatacctaaatttataaggatcccaaactggcagcaatacatttgcgcattaacaggtaaatggataatacacacacacacatgcacacacacacatacatacatacacacacacacgagaatatcattcaacaatgaaaaacaatgaactattaacaaatacaacaacatgattgtatctcagaacaattgtgccaagtgaaagaagcagacaatgaaaggagtacaaactgtataattctatttatagaaaattctaggatattcagactaaaatatagggacagaagagagattactgaatacctgggggacttgggggaaaagggatagtgaggtttataatggggcatgaataaaggtttagggctaatgtatatgtttattgtcttgattatgatcagtgatttacaagtcaaaattgatcaaattgcagactttaaatatgtgtagttaatcacatctcaatgaagctattaaaaaattaggaacgtcgttgccactaggagagagggagtgatttataatagggaagggacccatggaagcttctggaatacagaaatgttctgttccttgacttgggtgtaagctacacagattttcttttctgcagtccattaaactgaatatgacactattttatgtttatgcaatatttatttctttattatatttcaaaatttttaaagtgtgtgtatgtgtatatacatgtatttggaaactatatatttttttgaaaagaggtaattatccttaagacgcattcattttattacctctcctttaataacagccagtttaggtcttagtagtagcatgcttgtttgactataaattttatgcagcttaagttttcctaggattttgaaagtactttctacattcacagtcacattcctatgctgtctttaaaagataaatgagaaaaccataaatacatcatatctctgtgagcctcattggtggtccatgcatcatggaaatgtcatctattctggtagtgctgctagcaacttgtgggtgggtcgatgcactgggaatagtgcatcattttattttatttttatggctttattatactctatggccattaggtgcaatgcctctgttgtcccctggggtacaatattatatttattgtatgcatttatcttgtctctgatgattcattttcttttccatccaagatgagtttcctttttgcctgctgcgttatctaggagtccttccattcaattgctcaaaatgctttatcatggtgtgcaatatatatgaagagtctggggaagaaggtgggcgttgtcaaatctataaatgaatccaagaaaatgtcctcagcagccaagagaactattgtaatttgtataccacagaaatggagaagtagtacagaatttagaaagaaaattaaaaatagaactgccatatgatccagcaattccacttttgggtatacatacaaaggaaataaaatcactatctgaaagagatacctgggcttccacattaattacataattattcacaaaagccacaatacggagtaaacttaaatgttcatcaagggaagaatggataaagaaaatgcagtgtgtgtgtgtgtgtgtgtgtgtgcacgtgcacacacgtgcgtgtgtgtatgcaatggaataaatacttttatcctttacaaagaagaaaatcctgacattgttaacaacatggaggaggctggaggacattacgttattcgagaaataggccaacacagaagacaggtactacatgacctcatttgtatgtggaatcttaaaaagtctaattcatgaaaagaaagtagaatggtgagtgccagaggctggcaaagagctggagggacatggggagatgttagtcaaaggcgtcaaagtttcatttatgcagggtgaataaggtctggagatctattcacatagtgacagtatggtcactagtgttagtaatactgtatcgtatatttgaaaattgctgagagtgatcttaaatgttattactgcaaaatttaagtatgtgaagggatgaatgttcattaattttatttcatcatttcacaatatatacatgttgcaaaacatcacattgtaccccataaatatatataacttttgttaattgcaacttaagaaacctgaaaatgggccaggtgtggtggctcgtgcttgtaatcccaacacttcgggaggccaaggcaagggaatcgcttgagcccaggagttcaagaccagcctggacaacatggcaaaacccatctctccaaaaaataaaaaaaaataaaaaaataaaaactatgcaggcatggtggtgcatgcctgtagtcccatctactcaggaggctgagacaggaagaccacctgagcctgaaggttgaggctgcagtgagccataatcatgccactccactccagcctgggtgacagagtgagaccctatctcaaaaaccaaacaaaaaacctgaaaacaattttaaaagaaagagaaaatatatttatgtcactataaaaaatggtgtccatggggaaaatgagaactgaatcctaatgttaggtaggaaaaataaaatggataaaagaatcccattgaaactgtaacaggggactgtcactggtctctggaactagagaatacttacagtttttcctcagagtggtccctacgtcttatggatacgtcattatttccattttaaagtagggatgttaagccagagtcttaatgctaagtcccaggcaacagagttaattagaatcaaagagggggtgtggacttttgtctcacatattttgtacacactataaggatgttagtcataatagaacatggcatcatgtggcctaatgaggaggacataaatctacatgaggttctctgaggaacaggcacctgcaggctgagaaccgacatggacatttcaaatggtaacatttctcctttggcatattcctaaatccataaactctgaagacgtggtcaaaaaaaaaatgtcattctgcagtgaacttagttttctccttctttacctttattctatggatgcttttcacttatccttcatgcagttgtccttccatttctctttttctggaccacatttgaaacacagttaaatagaatgtctgcttcaggtttgcaaattatacttcatttaaagtatatgttaaagttgagtaatctttctatacctgcgcatacatactccccacaacacacacacattgtctttatcctttcatgtgctcaagagcactcatgtttattccatatcttggctaatgtgaataatgctacgatgaacatggaggtgcagatatctcttcaagttagtgattttatttctttaggacacacaccaagcagcagaattgctggattgtatggcggttcaatttctaattttttgagaaatctttatactgttcttcataatggctgtaccagtattcagtcttttagaaaaagacggaaattccgacattcgtgacaacatgaataaagctggaggaccttatattaagtgaaataaaccaggtacaggaagacaaatactgtaggatctcacttacatgtgcaatctaaagtagtttaactcatagaaaacagagggtagaatggggggtgccagaggctgaggggtgggggaaaaggggacgtgttgggtcaaaggtataaacttgcactaacaagatgaataagttctgggaacttagcttacaaagtagtgactatagttaataatagtgtattgtataattgaattttgctaggagattctattttaaatattcttacccaaagaaaagttaactgtaaggtgatggatatgttaattagctttattatgttaatcattaaaaaatatatacatatactgaaacatcaccttgtacaccctgaatatatagtctacaatttttatttgtcaattataccttaataacactgaataaaaaaacaaaagataaaaatatatgttaagccaattaagtagataaacccatttttgtttatatagcaacacagttttcagagaaagttttcactgacccattgaaatatagtaattcacttcttttttttttatgagggaaacaactcacataaaggattatggataatctctctaaaattaggctgcttctaatactctgcaaatgttaaggtgtttgtttttgtttttggaaggtggtgtgattgataggctacatcaattttgagaattctcaataactcttaggaattatcttagatgtaaattaattgctctgaaatagcaatacacatgactgaaaatttcagggcaatatgaattaaagaggtaaatgtgtgcactagttcgttcttatcataggcattgaaaaacaaatcaattatgtttgatgagattgacatttgatgccaattacctttatattattaaactgagaaacaaagaaaatgatacatctttgtgtctttgtgataatcctagaggtattcataggtgctgggcaaatctaaatatttttgttttcaagaattatgtaatatatgttataacatgcagtaaattatatttctttagatatatttagctattctttgcaaaagtttgctcatgtgcctcacaagtttaggtagaattcctatgccacgttttctacttggaaatttgagtacacctaaattttttgttaagattatgcaaaggtccaaactatccattcaataagtgggttaaatattcccacccaatatacttcctgggaatattgcagaccttttgttttgttttgaaaataattaaagtgattccactatctgtaaaatatcttctggaaggtgctggattttcctctctttcccatagcttgttagcaatactacagtttggcaatagattttgtcttttctagggaatgaggcattggggaaaacagaaattctttctagattacattattttcattattttgataaaatgagtctgatggttttttgccagcaattgaaggtaccagtgttcaggggagtattcccatacatctccagaggaaactcatctttaaggaagggatgtttgatgactttcatatactatcttgtctaggaaaccctagaccgacataagcacagtagaatcatggagaacagaagtttctacctaatcaatcaattgttgtgaccaaacacattgaaatgctatcttaaaacttgcttattatctactgaacactacctacattatttcaaacccttgaaactttgcagcagggccagtcttcatatcccaatttcacggatgaacaaactaaggttgagagagattatgtaattgttaaaagagctgggctttgcttccaggtcagtctgaccccatagcacatcctcattccagtacattgttcctattgcttttcattctaaaagcaatataaggaagctattttaaggatgggtgaacaggtcactagatctgaggctctctctacattcaactgtgggtggaagggtaaacagattaataacataatcaactaatacacctttaaagtcagcatctcaaaagcagaaacatcttaagtgggatctgaaggaatggctgccactttctcagttctttcataaatgttctttctacatcggtatcttaattctttttaaacacaatgattgtaataatgatggtaatgatgttgaaactgcatttttatccaaattcaggcagttgaagcttttgaaattggcattgatgcataagaaatattgtaatggtttcatgacacacatgtctaaaagttttcttcaattaagtaataatagaagcaatgggtactcactcaatgataaataaaccgaaacgtgtaaaataaaatataaaactcaaaagaatcgcatgctgtcatttatgccaaataaagtataaaaatttgaagagctttacttttaacttatttctaaaaaattacattttgctgcaaggctgacatagatttatatttaccatgacttttgaggcccaacctaagaaaatgatgaatgttagggcagtcaagcctatgaaattgtttatctgtgaaagattgtgtctcagtcctagtctaggcattgttttcattttcacattttttaaaggtcttactatttttcgaagtcatgtttttatcctctgccaaataacaggcctgttgttgttttactcagttttctctttataattgcagaaactttgaaaataaaaagggtaattattttctgatgtctaacaagtgattgacatactacaagaaaaatgaaaaatactttttaaaaaaactttatagaccggagatgggatttcagaatcaaacgtgcttgtggatttggttttcattgatgggttttgctcttagattgtcctttttccactcacagttccaggatttctttccaaaaatatcttgtgaggtccaaatggtagccagaattctgtctttgtttgatgagcctgtacatttcttaatccaacacttctcttgaaaaagaaatacagaaagtatactgtagttaatggtagtggggtatcctacattttgtggggaaaatgggaagcttgcctgtctgttactctttttcatcccttggctgaaagaaaaacaatctaaacccaaagaacaaaagagagcttaggaatcagaacttagacctgggctctggagccagactacttcttagctttttttcctgtgtgtcattttgtttttatactatgtaagtatatttgtaaataataatccaagactttcaaaagtacagcagttctgtaaaacaaatgttcctacagtcaaaacataactttctctttttattgagtaaggctctgtgcacatctgcttatcagcagtcactttctcaatgttagtttcaaatgtactctgcgccttctgtcttttcatctgcactgaatgcctgtgtgttcctacgttcttaacttctgcattattttcctgtacttcctcctctatttttttctaagaatgtagttgtttgtagttaatggtgcttataatttggaaactcaaaatagtaatattgctgatcagcaactaattactctgaagcttgaaaagtttaattaaatcacacattccttggagggtcctgagtcctggctacttactttcaaagaggctccttgctccctgctgagctgatgggatttcagtgacaaccttcactaagcctgaacttattgaatgcctacactgaatgtaatactgcatgagtaattgaggatggtaccaagttatagctcattgtccttatgcacctgaatcttatagtcttataaaccttcccaggggttgggtagaaggaagacttattcagttcaagagtgcatcatcataataatacaaagaaggaagagaaggagaaaaataaatgtggattctaattctggagaaatttttaggaaaaaatattcctgaggtctgagataaacaaggaggtcttcatttacgagttgaaattccaaaaagacatcaaagggaggatgagatttgcataggaaaaggaatagaaatcatgttagtcccatagttcatgtatccaccttctcctctctgtattcaatctacaaatatttattgctattatgtgcagatcagaaaacaaagtcctcaccctagggaatcagcaacaaaacttattgagaatgcaaagaagaaaaactgttatatgctagaattaaagaagtacaaagatttctgagagcatagagaaagaagtagacagaaaacttgcagaagacttaatactgaatatttgaggcaagaggaaccatgtgactgaaactatgtttatttaaaatataaattaaagaaccaaggcacaattgcagaacttatgtggagtcaaagataatgagaaaatcttggttttatttttggtgcagtaatttttttaagtgttgaaaattttgttaacgttaaagagctttgcacttacaagacactaagatacaggagtgatgcttcataaagaagttacctgtcagggtttgggcattagtttagaagttgtggagctttgatttattttggttaaatactttaagaaatcacaatcttgatccaggactgataaaagtattgctaaatttgaaagatgcctcttcaagattagagtcatatattcagacatagaacattagaagatcctgtatggaaaatacattctagtctattcttactagtggaagagccctaagccacagttcccattcatcgaggttcaatgcatcaagtacttctcgaagtgcacttacatttagtagctgattaaatttttctgacaacagaattattgttactattatttttatcatcatcatcccatttttataaatcagaaagggaactgggccagagggtagttaagcagttttcttaaagacttacagctattaggttggtgcaaaagcaattgcggttttgccattagtaattgctttgccattactatggtattttattttgctgttactaatgcaaaaatcacaattacttttgcaccaaactaatgctgattttgagagccagacctggagtgtggggatactagagctagtgcttgagttctaagttgttctgctgcaacggcttggacttgaaagcagagaggaggggaggaggagcaaaaagacagagatctcacctttgtggcagagatagaagaaagataatatttagaagtttagctgtgcattaagaatgtcgtagcctccttttttcattttctaaagaaacttgaaattaagatttgaattgcttccaaatataaatgtgctagacaattgtattcctgaaagacaagaaatgctgagtccaaagaataactgagaagttcagcttttatgatttctgtgtcctgtaattagctgcttagtaagtgatttctaaccttcaagaaatatagaccctccaatgactgacaactgttaaagtatgtgttcttaaaaagttaaattgttacatatacagtaaacacatataaaagatttcattctactcattaattaatgatgaaaatactaaaaggttaaaactggttcaaatgagaacgtgattcgtggaatgcatattttctaacagagaaagttaatttgcattgcaatgaacaggaaacatttgcattgcttctgatttcccacagcttaacttctaccccttcaaaatggtcaaatagctaataatggcaaatcaatcacacatgcacacctttgtagaatcagacaatccctagggaggggcctcaagacaatgcccagatctccactgaaagggcacccagtagtctctcatgcccacctatttccaagacctggaaaatttttctgacatcataagactcttaacaattagactaaattacaggaagaaaggataagaagaaactaaactactatgaagactatatagctatagaccagcacatatattattggggaaaaaaaaagtgtaacaaagttttatttaaaatgttggtcttaaaccattatgttctacaatattgagctgtggtttttagatctaagacaacttcccttcccccatgtatcatccagctctgattttttttttaatctctcttttctgtatctaacaggagacattgtcaaaacatcaagcttttctatcatgcaggtccagataaagagggttggagtggatatgaaaggattccactgaggttgggatgaaagaaaaagacgatctagaaatttcaaggaactctgctatgtaaatttacctgaacattacaagataaacctgagtgtctaagagactatcctaatctcacagacattttaacctgtgtaaaccctcgatttgctggaatgaacttcagtcatgcatttgagaacccccactttaaatatcgtaaaaatgtcataataatttcagataaaaggtttccatttttctccttatgtttataaaacaaaattaaagacttgttttttcctctttttcatttcaaccaacaaggttttaaggcctgaagagcaattatatttatactttgccatgtttggttgaaagtttaaacttgaaataaagttgagatttattgcacttatgttctgctgcagtgtaattgttattcactttctggaagccaaacagaatctatatcatgtttttggttttttacaaaagcttgattctatttttcttcattcacacgaacccgacacataagtccatctagaaggtttataaacattaatgtataattcaaagtttattcttacttttaactgcttgggtggtcaagaataaggttgattcttttttctgtctacactaagaaagtatctttcacaaaggattttgtcctatttgaaatggcgatggagagcttattttgtttggaattggcagtttttctccagaggggttacatttctaaagttatatggccatccaaaaaagattattacactagtccaacattggctgattaaattctacaaaatcaggaaattagggtatatcaccaatatatttttttaaaaaagaaaaatatcagtgtgctaattgcttttattaaaaagaaaagaaaaaaactaaaactgaggttgcttctgtcagaaaggctggcgccatggttggggaggaagtggaagagaaaggaaacttattgcattttatataagccctcacacttatgtttttttttaatttgtttgtttgagacagagtctcgctgtgtcgcacaggctggagtgcagtgctgcgatctcagctcactgcaacctctgcctcccaggttcaagcgattctcctgcctcagcctcccaagtagctgggactacaggcatctgccaccatgctcgattaattttttttgtatttttagtagagacggggtttcaccatgtttgccaggctggtcttgaactcctgacctcgtgatctatccacctcagtttcccaaagtgctgggattacagatgtgagccactgcacccggcccctcacacttatttttaaaaatatatgtacacattgattttatgtaatactaataaagttagcataataactacataaaaataatgataaaactacataaaaagaacattttactgtcaagtaagggtgtcatgatatttaagtgagaactgcaaggtgcaaaaatagaaatattttaaataacccaactatagaaaaacaagtgtgtgtgtgtgtgtgtgtgtgtgtaagtgtgtgataaaatctagaggcatacatggcagacttccaacattctgtatatgaaaagcaggattggcagaagcagaggagaaatcgaaggaaggatttatttaatagtctatgttgtatgagtatttccataatgagaattaacacaaagttttcgttatttgccggacccccttcttagtactttgcatgtattcatgcatttgctaatgattcactcaataatgagttaatttacagttaataccattaaaaaacattacactgtaatcccagcactttgagggctgaggtgggtggatcacctgaggtcaggagtttgcgaccagcctggccaacatggtgaaaccccgtctctactaaaaatacaaaaaaaatttagccaggtgtggtgacgtgcacctgtaatcccagctacttgggaggctgaggcaggagaatcacttgaacctgggaggcaggggttgcagtgcgccaagatcacaccaccgcactgcagcctgggcaacagagcaagactctatctggaaaaaaaaaaattacctatggaacttttaaagaaacataaagatctcaccaaaatgtggaaattgtatgaggtttttcttcttatttttttttttaatccctgtgagtatccttttcaaatgtctctgtgcagctcttgagttgcgttactattgagtattgacatctgcaatttagagtttttatcatctcgatggaggaaagacaattttaagaaatcctcagaaagggttaaagttaagttggtatttcatggctattttattccatttaatttgatgtttaactgatgcagctaaaccagtggttctcaaagtgtggtcccaatctagtaacatcaacatcacctcaagaatttgttgaagggcaaataatcgttgagctccactccagatctactgaatcttaaactttggaagtagggcccagcaatcttgtcatgaacaaactctctgtatgaatctgatgcaggctcaagtttgaaaaccactgatttagaacaagaaacataatgtatttatactcccttatgtttctctatgagaaattatatcaagaaataataggaaataacagtttctattcaataaaattccccaataatttatttgtgatttatatttctatgcaaataactcccaatgctaagatttctgtaatgcttgtgcagatggcttttctgtatctgaaccaactgtatcacaacaacgtcttccattacctatctatgatctatctatctatctatctatctatctatctatctatctatctaagaaagagagggttaaattctgctcttctggtatgcattttggattagtaaatcatttttattgacatggcaaataacatgatgactgatggacaatagtgtccatttttaagcaatgtgaaaatcactgcaaaaaacaggttacttgccattcaaagacatcagtgaaaagttttaggcaaagataatgtggatcttagtatgaacttatatttctcctttaagcaaaacatgaacagaattatatccagcaatgtcccatttctttatgtagttaaatgaattctccttgttattgttttgctgcatgataatttaagaagttgcctctgctttctctgtctaaaactatcatttttaaactttatttttagttgctgcaactttcctttaattatgcattttggaagctgtagtgggttgaacagtgtcccctaaaattcatgtcttcttggagctttagaatgtggccttatttggaaacagggcctttgccaattaaagtgagttcacactgggtaagtgtgggtcctaaatccaagactggtgtctttataagaagagtagaggacacacagagaagaagcccatgcaaaaacagtgacagagattggaaaggtgcaactaggagccaaagaaagccaaagattgccaggatcgaccagaagctaagaagaggcagggaagaattcttccctacagccttcagagggagtgtgggcccaccaacaccttgatttcggattctacaatccacgactatgagtgaataaatttctgttgtcttaagccactaagtttgttgtaatttgctatggcaaccctaggaaaacaatacagatgctgaaaaaaggtaataataagaataaattctacaaaagaggagcttctctggactccggagccaggtctaggagtctgaaagtatctccaaggaactctcaggatttctcagaaaacaacagctccagaaaaagtgggaacaatgcccttgagctttcattatttgctttcagcacgtcagacactacttttccaaaaccttaacaaaacactttaaaagaaaaaatggttttttctatttttacttccaaagatagagtgctttctttctcaaatcattcttagctaaacaccagttccacaagattttaacaggaagtcaatgagaaggagaaaaaaaagtttttaagatcccatttcatgctaattccctctctcagagattcttatgcacattgagggcctaaaggattctgaggaagaagctagtttatctttggctaacataggttatacacttttggagaaatatggaatgaaatttgggtaaactctggagaatggaaattagactggaggttagatgactacatttctagtgctagcttggccacacatgaccacacaacctattctactcaaaacctctgttttcttctctaaagacaagagaataccttctctctccttgtcacataattgtagaaagttcagcaatcatagttacattgctttactttataaagatgctttaatccacttacaatacctagaatccagaatattgataatatctatattacttatctaagaaagctgatacaaaataactgatttacataaaagcaccttggaaagtaaaaggaaatattatatagatagaaaatcaaatttactatttgatttacttgattcttttaatttattgatactatgttgggaagttaagagtttctgtttatagataatacaattaaaaaaatcaatctatacctccattccaattctgtataaacgtgatggcactgctgatgataacatctttaccttgtcagtaatgtttatagaagtggggactcttacagtgttgttattttgtttgtttgtttctttgtttcacatcttccaaagcatagaaaaatgggggtatttccattgtgttttaattttcatccctttacattttatactttgtattttgctaagtgtatgtaacagactactggtttttaagactaggaataatagctacatttctgtgtttggggaatattaatgagcacaaagggcaaacaaatcactagaaattctgaaaaacattgtaaattctccatgtttacatgtttaataaaaattatatgtttatataacaaatcctataacttaggcagatgtatatacgtatatatacataaaatattgtatatgtatgtgcatgtgtgtgtgtgtatatatatgtatatacacacacaatgttattctagcctaccattgatctgtgaaaagagattgttcaccacatccttcatatcacattataaactgaacattaaagtaaaggtatctgactcataacaagtggactatattaaagcaaagtgatttctgctaaggatttgacataccaataaattgatattcaaacagattaaatgtatacacatacacatattgatctaagagaatatttagtctaattatatttgttgattgacagatatttctccaaaacaaatacaagtctctctatctgctgaaaatgctaatgctgatgctaattaaagcatgcacatgtacatatgtgcacacatacacaaccaaattattgaaaaagtctaaactatgtgaaggaagtggttttacaaagagaaagatcaattgcctacacaattcaaattttctagtgaattttttaatttgtggtttactttattcattttggagttactttttacctgaaaaatgaactgaatatttattgcagttctatacagaccagagtttagaaaaacccacaatatccagtttctaatgttctttttcataatatatgcaaagaatgacttattacttgtcacttacaaaaatatacattgcctctaatgttgggaatttcataaaactctataaaatactgcatgtccatatgtggacaacgtgtaaaatagactggatattttgccacggtttgcagtatatattttggagctccatgccaactttccattctctttaccaaagaagttgtctaaattgttaatgcagaatattttaaacatagaattttatccaaatctgttttcccttaatatactttttaaaggggaaaagttcagaatattccaatcaattcacgtacttgatctaatttatgcactgaggaaatcaaaactgtatgtcatttgaccattttacacttgtttctagtgagattactaataggtttattatttaatttataatccaaattagagtaaagggagaaaataggttatggaaaaccagtaatcattgcagtacttgtttattaagagccaattttgtacacctggaaattgaattagaaagactcaaagaaaatagagtcaaataattaaccccttccttcttataagaataaatggtaacaagagattggtaacctagaagtattttaaggaacatgggctgctttttgaggaattggttgatgccatctttccagagttgaatattggccatgcagaaatgatgggctaaaggctaaaaacggatttccaccactagttgccattccaaatgagatgctatgtttccaaagagtcttccatggaaagaaaaagcaagttagtgaaaataagaatttccatgtgtttatgaaagaacaacacgttctttccagtaggactggtaaaactccccctcctcaccaaatactatgaacaaaaaaacaatgatcaaaattgtgattaaaaagttaaaaaaaaaatcaagaatcacaaccaacactgtgaaccttattgaaagctggaatatcaagcttagctctgtctgaaaatttaaataagcgcagattttttttaagacaacttaaaagttttgtgtttatctgtattttatttttgttttgtatcctctgcctaaaataaaagcaacattcacatactttggaaacagctgacgcttctgcacaagtagagactgctataactttaaaatctcctaagagtgtttgtgctgcccattcttaaggacccagggattatggttattctctctgggaacacgaattcaaatctttccatccttttccattagatttcagtctcccatcatttctattgattacttatcactctgaataggagaagagcatttaattacacatcagtagaaatgcatgagttataattccacctcagtcatctttaaatagcccagttgcttccattaggtacttgtaagactttaggaaaaacagtttccctgtggatttcttcttaattctccctcatctgtagtctacctggtagggctagttggtctctagggttcccttcagtttcagtttctgatctaatacatctttaagatgggaatgaactttctaacaaagcaggagttgtcaccttctttacacccaaacgagtgtttgggtgcctttcttaagatttcagatgccacagagatagttccttgagaggtgacatagcttaatggttacaggaaccaagtaaggagccagattgctaagactggaatcttgtctctgctacttaataggtctgtgactttaattaattaccttacttttcggtgcccccattttctcattgtaaaattgggagtgttcacctcctaaagttatggttaggaatacagtgttaaccaacgtatagtagttaaagaagtgcctcctggaaaataagtgctatgtgagtgtttctcagttgtaatcattacctcttaataacagaaaagaggaagttgcagatggtaaacacatttaattttgttcctaaagtgctgttcaatttatgggaacttaatattaaatcataggttaaaaaatgaagtgtcagtgataaaattatcataatttgtagataatagagttattgggaaaattcaaaaggcttatacgtgaagccattccaaacgctaaagcagttgaaaaagcaatagatttttttttttttttgcagaacaatattaaaggttacaaaaataatgaaagaaatctccttcacaatggaagcaaatacaaaatacctaggaataaatgtaacaaaaattcatttaactaatgaaaataaaatgaactgaaaaatcaaatagaaaaattaagggaaagatattcgagttgtgggttggaagccataatgttctcaagatgtcagttcttcatattttaatataggtcagagcagtgccaataaatatcctcacccacttaaaatatgtgaattttatatgtaagaacttcttcccaagtttttacaactgacaaaatgattctaaaatttatctaaaagactaagtaaatgaataatgcaacaaagaaataatttgagagaaattatcttattaagtaataaaatactgtatgtttggactcacaatgggtattcagtttaatggaaaagaatggatagtcattaataatacaacatggcagccagccttcaagatggcccccacatgctccttgtctcttggtgtttgttcatgttctggtgtcttctcctcccacttggaatagtgctgaccacgtgaaaaataggatattgttgaaatgaccatgtggcttctggtgttaggccatgaaagacattatggcttttgccacgctttcttctgcatcacttgctatatgcagtaacaggtaactaatatacccaggtatacacagtcatgcataacttaataacaggagagcattctgagaaatgtgttggcagacagttttgttgtgtgaagatcatagactgtacttacacaaacctagatgatatagcctagtgcacaccaaggctatatgatatagcctattgctccaaagctacaaacctgtacagcatgttactgtactgaataccataagcaattgcaacacaatggcaagtatctgtgtatctaaacatagaaaatgtacagtaaacatatgatatgacagtcttataggaccactgtagtatatgcagtctgtcgttcaccaaaatgtcattatgtagtacatgactatatataagggttaataatcatatggattgcgcttcagtgggaataaagaggttatccattaattttgtttcaccaaagactaaattacagacctgatatagataaaaatggtaaggagaaatataaaaccaccaaagtatttgggaaaaaaaagtagaatttataattctggacttcagagagcttttataagcattatatccaaatggattttaaaaaggaatatactgatagactttgaatcataaaatataaactagtaatgcattgaagaatataataaacaaaatgaaaagagaaaatgacatctctatggtagataggccaatcgtatatatatacataagttcataaatttttacaaaatagctaatataatgcaacattaagtgaaaaaggtaaaacatcaagaccaattgaagtttatcccaagaatgaatggctgatttgcatttgaaaatatccttttgaaattgtggtttcaactcaggcaaatcatgtaatctctttaaacctcttgcccctcagttctacaataagaataaaaggtcctgaaggcaccagttctagtgttttatagcatcctaggatgactgtagttgacagtaatagatacctttaaatagctagaagatattaaatgtttccacacaaatgataaaaatttgagatgatgggtatactaaaaaaaaaaaagaagagaaaaaaaataattaccctgatctgatcactgtactttgtatgtatcaaaacataactctgtatgccataaatatacacagtaattatatgtcaattgaaaacttaaagatcatggaagaaaattctgatttcaaactagggaaaacgttaaaatcttaaaacatgctacagggtataacctatatcttaagaaataaaaagcttactaatgaaactttaaaaatatttcctttttaatatgtaacaaaacaaagatgtttatcattatcatttctatttgacattctagttggggttctaactaaggcacttaagaaaataaaaaaggcaggtgcggcggctaacgcctgtaacaccaacactttgggaggccgacgtgggtaggtcatgtgaggtcaggagtttgagaccagcctggccaacatggcaaaaccccacctctactaaaaatacaaaaattagctggtgtggtggttcatgcctgtaatcccaactactcaggaggctgaggcaggagaactgcttgaacccaagaggcggaggttgcagttagttgagatcgcaccactgcactccagcctgggtgacagagcaagattccatcttgaaaaaataaataaaataaaaaagaatgtaaatgttataaaaatgaaaaggaatagcatctgctatattaacacattctataattggctatataaaagtataggagaaaaagcataggaaaattatgaaaagagacttaaacaattttgttggatctataactgacgagagaaatcaaatgcaattgtatacacctgagacagacaaaaaaattcaagatatgtagttcagagaatcaacagttatctatgtatagatcctacaaaagccctttaaggggaaatttgtaaaactaatatgcagatattaaaataaacctaaataaagggagacaatctcactgataggaagtatcaatattctaatgatgtttattctacccagtttcttctatagattcagtgcaatttcaatataaatatcagcagtgtgtgaatttttatggtatgctaacaagaataaaatatgatttttagtgtcagagaaaatgaacatataaaacattcttttgacactgcactgttatttttaagaaccaagattctaagaacataaacagtatatagttgttactttaaagaaggtaggaaatcttcaggtttgcaaactgctgcaacatttcaaagcaaatatccataggtttagcaatagaaatttcattagtttgctagggatgctataataaagtaccacaaatcaggtgcctgaaacaacaaaaatgtatgtcatcacaaatctggagacaagaagtccaagagtaaggtatccttagggttgtttcttctacgtcccctctcctcagcttataggcgccattttcccctccctgtgtcttcacttgatcttctttctgtgtgtgcttgtgtcctgatctcttcttataaagacacaaaatatattgaattaaggactcatatgaactcattttaccttaattacttctttaaaggccctgtttccaaatacagtcacattaagaattacagggtttatgacttcaacatgtaaatttgggagggaacacgattctgccaataacagaaattaaattgaaagattattgcattcagctgaaaagagcactatttttgtttgaagctcctatggatcaattactaacaagaaggacaacttaatattttcctttaatcaagataaagtgatagaatgcataagtaggaattttgaattatatgcaaatcatgaagccactttcagcttataagactcaacaaattgtaggacatcaaaggaaatatattacaaggcgattgaataaattcacaataaaattcacaatttaaattaaattcaaacttccataaaaatgatttctctgaatagttaaatttttgaaggaggatttttctgggataatttatattttgaaataacttattttaaaagtatcctcaagttgtcacagcctacaaaatacttctaacagctccagtaatagttacgctagcagagagattcttctcaaaattaaaaattttcaaaaaatatttgcaaacttgaattttccaagaggaactaatgctgctttcaatcataccagttaaaaatgtagctgctaaaagtatttacattttaaggaacaaatatttttgcagaaaagtgaaccaaaaacattttcttattaagataccacattacaaagtattattatttagtttattatataaaattatgacctcaaaatcacttttttgtaattcacaagtttacattgttatgatatactcatgtatcgctattatccctattacattttgtaagtttatatattttaaagaaaaaaatttctattttaatatctccaaggcattttttctctgctttttgattagggctcctacatttgcatttttcattgggccttgcaaattatgtagctggtcctgcctggtagatttgggaccatgtcaagccaagaggggagttactctgggatttatccttaatgttctctttacaagcacatgagataatttaaccttgggatgttggtaaattaacatgacaaagagatttatgctttcagagaaatacaaaataaatcagggtggagatatttacaagtcagaatgtttctatggaccataccactagtctaatataaaatattacaatctacacataagcagaatgggacattttttaagaagggaaaaagaaacaaattaaaataaaatattaaaatctatataaaaaatacatcagttagaacaacgaaaaatgttcagcctgagaacacggaagaaattgagtcttagaaatacggcgcggtggctcaggcctgtaatcctagcactttgggaggtcgaggcgggtggttcatgaggtcaggagattgagaccatcctggctaacacagtgaaaccccatctctactaaaaatacaaaaaaaaaaaaaaaaaaaattagcctggcatggtagcgcaggcctctagtcccagctactttggaggctgaggcaggagaatggcgttgatcccgggatgcggagcttgcagtgagcctagatcgcgccactgtgctacagcttgggcgacagagggagactccttctaaaaaaataaataaataaaaagaaatatacatgagcagagtgcatccttgcatggtgcatttgagacagagtcttaaagaattttatgcctattttggttccattaaacaagcttctgctatttggtcctctagttactaaaaggccctctgattacattttccagtgggattatattcagggacataatatgctaagtgcactttacagaatattccattttatgtgatcatttggtagttttttttcttatcaaatgaataatttgcccagactggtatgataggctgaatagtatctgagtttcaagtagctaaacctaaggctcactttcatccttgaaactatgtaaaccaaaagaattgacataacataatgagatcagctactatgaaaagtacaaattaggtaaaatttgtcagtatttaacctctccttgcttttgctatttttgggggtggtacgcctctccaggcatccagtcctctcttgttaaacaatggatcattaaaacctaccagtgtgttttctaactcagcctcggcattgtcctttacttgagaccagcgtttccttgaatgactgtaattagaataaacttggaaacttccaaatacagatttctaaactacaccttcccttctggacctcgcaagttagaaccccccagaattgttcctttgaacaaattaccaatttaaatagtatcataaatcggaacatagatggtatagagatttggactgtaagccactgctttatgtatttccttaatgcttttatcacagcctttttggactacatactattttgcattctgccctcttccagttttaatgtttattaaaagtaatagtttaagtaatgtagcaggtaaataatgtataatgcatactctgcagctagctaatagtgaaatcacgttaaaatgaacaagacccactgggaaaccactgtgaattaaagactctctgtgagtgattagggatatattagcatgtggtcccacccgttgagcctaaatatgtttcctaaaactcatacagctaatcttatattaatataacaatgatgatgatcattattcttttattgcatatcttcattacttatggattaaaaagtcttgaagtagatacaaagttgataaactggagaatttggcaaaagttataagcgttgggctgagcctgatggctcatgcctgtaatcccagcactttgagaggccgaggcgggtggatcacctgaggccaggagttcgagaacagcctggcaggtgaaaccccatccccactaaaaatacaaaaagtagccaggtgtggtggcacacaactgtaatcccagctactcagggggctgaggcaggagagtcacttgaacccgggagctggaagttgcagtgagcccagatcgtgccactgcactccagcctaggagacagagcaagactccagcttaaaaaaaaaaaaaagttataagccttgattggtcatgagatctgtaagcccagggatgaattataaactgggaaggaaaagctgcagacaggggaagtgagtggacataacagcaaagattgaaggagcagattggtaagatcattgcctctgggaagttagtggggaaaaaaatggtcttatgaaactaccttgaaaaagttattacttttactatttggctttctgtgccatgatccactcagtccctgctgtatataaatggtgaaaaattgcagtaacttacagagcatccatgaaattgaagtggcatccagtgatatctatcagcttttaaattcccaaagaaccccacagtaaatgtgaatataaacttcccagtggtctaattcttctttaataacatcctccagtatgttattttaggttgcctaaccgagacagtggggtatagaggttgaaaggacagcaaaaaatagtaaaaattagagtggaaacaagtgggaaagtattgttggaattatcaggtcatgtacctaacccttataacactgaagaacttcaggtacacacactggggcctgttggggtgtggggtggggaaaggaagcattaggaaaaatagctaatgcatgctggacttaataactgggtgatgggtcgataggttcagcaaaccaccatggcacacatttacctgtgtaacagacctgcacatcctgcacaagtaccccaaaactaaaaattaaaattaaaagaaagataaaagaacccaggtagtgatttttggttttagcaccatcatttgacatacttatacaatgaaaatccaatgaatacctcactctctgtttcccaggaatcttcatgaggaaggttactccaccagcacttaggtccctgatttataaagatactatcaattatgttcccaccctttcaagatgggtgctcagaaagaaatttcatgccacgtggttatagcaccacactctgttgctttgttccgggatttagtatgatccctctttattcattgctctgaaccagaccaggtgtcatattaaggaccttagatatactgcaggaatctctctctgtcttgctctctttctcttttacacacacacacacacacacacacacacacacacaattcaaaactgagatattccaagatgaacactaataagtaatagagacatgatgcaaagataccttaagtggaaggggatttaaaaatgagaggatcaaagaggcaagtgcataaaagaactgggtagagagatagcaggggagtgcaggagtagtcctgccaccagacgttgtttcagcagctggatttcacacatccttctttatgacattacaggacagttcaatacccaatgtgaaaaaagtctaagatcattttccaatctagccttattggttcccatatgtactacatccatcttcaacatccaacatattattttctgaagagtctaggaaaatgattgtccagaggatggatggaaagaaaatttgttctcctatctttatagttctcagaattactatttatttcaaagattgatcatctgtgttttgagactgctgtttaccaatgacaaacaaatgtattttccccatttttcctaactgcaattgtttaaacaagcatatcatttccttgtatatgttgtgtgtctttagttagttttgtaataaacttcctgaatcacagtgataacatgactcatgacaagacagtgtgtcttttattgtgttggggaattttaaagttagaaaaatcaatcattgctgaaataaagagacattaatagaaactaggactttatgtctttataatgctttggtagtaacagatcacaaattaaaatgtataaatatcattctaccttttaaaggtctaaaacaaaggaagcctgatacaattttggaagtctttctgaaagtgtactttttttttttttttttttttttttgagacagggtctcactctgttgcccaggcaggagtgcagtgacgccatcatggttcattgcagcctcgacctcctgggctcagttgatccttctgcctcagtctcctgggtagctagtactacaagcgtacaccaccatgccaggctaatttgtttcttaaattttttgtagaagcggggcctcacgttgttgcccaagctggtctcagactcctaggatcaagcaatcctcctgtattggcctctctaagtgatgggattacaggtgcaagccactgtgcccagccttgaagtataagtaccttttagaaataaatgcaaatacatcttatttcttgggattctgtataatgccaaactaatatacacaacatagactcctttcaggccaatttatgatataaaatattttagaattcttcaggatttgaatgaaaaagaatgaagtggaactatctaagacagaaaattttttaaaaaaatcaaagtttgggtaatgtttagagacgcgtgtgtgtgtgtgtgtgtgtgtgtgtgtgtgtgtgtgtgtcttccactttaatcagtctctatgcattttgcttccaggacaggaatccaaactccaagattccagggaaaggtctatttaggggaatgtttggccactttaataaaaataaaagacagataatctcataaaataacacttttatatgaaatttccaccatagattttcagcccaaagaagctgagatgagctgcccagcggtctgcatttttccccatttttttctacacgagggtgggtgaggaaagggtggccactggaattatttggaacagtaactgtcacaggattctctttcctttcctcttcctttgcagccaacttttttttttttcactccggattctatcaacatctaaaatccccagtacctctgctttgtgacttggtattctggaattttaccaactgtttgcccctcaaccatcgtggaagaatatctttatttcttggaagagcgaagaatgacgtaccgctcatccctttccacatttcttccacattcattttcattttgttcacataaaaaatgaagtccagtgctttggtggacagacagaaagacagacattggtgttcaaaaatcaagcctgaccttttgaaataaaccagatcagatctttgcactgtggaaaaaccatttccacaaaagcaagagtgattttatgacgtcatgacaagaccagcagtcaagcattccaccaaggaaattttttgttgctgttgtttctaataaaatgtttttatttcctgtttttgattttttttaaagaaaacataattttctcttaaaatgaatgactttttgtgtgtgaatcactatttgtgaaccaatgaaacactaaagcatgacaatgcaactgaggctttaacacgtgtgttcactggagaatatcttaatatatgctcctataatagagcaggtttgttttgccttaaaattaggtggcaatgtatatctaatgcttaggatagaacatggtgcctaaatttctgtcaaccatatacaatcatgtgtttgctctatgttaatgtcgtgggtactgacattctctctaaagtgaaacttttaatgtaatgtaaattatttctttgtctcataacctcagtagagtgaaatcctaaattcagtgggttatttaaatattttcttaaactcattaaaataaacacctattataatcaaaaaggcatatctatgcctttttggaaacacttggttaacacatgatgggagaagtgaggttttctctgtgagtctccattctgatttaggctctcacgccattttccttagtactaggtactcccaagcctttattcatttgaacacttttgacaacgtgtcttaaaaattatcgtcagtgtttttcttcctaagtgattaaagagatgccttaactggcaagaacggatgtcccactgttttttgactatctaggcagctctttgttttttgttctaatagtcaaagcagaaaaaaaaaaatccttaaatatatcatgctactatttattttaaagagaagtgctgtttgagggaacgatacttgtttacatcagatggaaatcgtattagtacaggcacatttctaaattcaaattctaaatacacctttgtccaaggggtacgaaggccttgtcatgaaagctgagttggaactggacggtcgcacagcattgcttttgtctgacttccattctaatctgttgacttttaaaattgaatgagaaacattgtttcctgataagaagagagaacataaaaggctgggaacacaataagggatagcattactcaccttggagaacaggacttccaggtgctcttgtcattactgttgtcatcggtgaagagttcaactgatagatagctccgattcctgaaactcctatcagctgaggctcagggaaagaaagatttaaagatgagagaataagtaaatcagagaaaggaaaaaaaatagaaaggaaaataaaaattgaaagaatgcaatgaataaggaaagtcttaaagtacagaattgcaaggtactctttaaaaagatgataccagtccaacccaaagcagtggataattttggttctgtttctaaaatccttaggctaaaagtgattcttggtgatgataatacaaatctctcagggccattgctctaaagaatatagtccttcagcatttcattaaactcacaaatactgttgtggatgatattggggaaaataaaatggaagcttgaattagaaagacaggccttggataagtatgcaaaacaggtggtgtgtatcctccgacccaggctatcaaactctgaagagctgctattgatggattctcttttggtctgtccttcctttttccactactcccctacaactttggagcctttagctacattccgcaagtctgagtctcgtcgctgccatccttgtttatgtcagaaatagtcatttttatgagatcttctctgtccaatagcacatatgttcagattgtatgccagtcactctgtgcttccaagttaccaactatttgtagataatatatcttattcatagtagagatgcttcttcgtttaattttagtattttggatgtcatattttaatcatggaggtataaaattttaagataaaaggaatgcttggttttttaagataaagggaatgcttagattcaaagtgaatgctcagattttaaggtaaaaatctcctcgtttcaccagtcacttcagccatttaggaagctggttacagacaagaatgagagtcaagcagttcaaagtataatttttacagtcagtgttcaagggttgaagctctgcttcacaatttactggccaagacttcagttaagttacttacttcatctgtaaattggaaataactattgtagttgtttcctaggatgcctgtgagcatgtaattgataacgataaaatacctggcagattttctagcatgcctgaaccactcactctggcatgtagtaagctagtatcattttgctggtattattgttattattacactactgatggaaggaatggtgctgagtggctgagtgaccaatttatctgggggtggcaatgaggaagaccaaaccaggtatactaggcagagttctggcagggaacagatgacacaattaattaactcaaagagctagttgaagagagttcaataaaagaaatatttgctgatgtaagggtaggttcaacagaatcatgaggggatggcagagtgcccagaaactcgccaatagtaggaagctcagccagaaacttcctaagcctgcagataagaggggagaaagttgtgttactcaaatcttatgacagttatagacgatggagaagggttatcctgcaaaagctacggttaaagacagacaacccagccaaaaagtggaaggggatatatgactactatttattctgcctggtaactctcactgggtgatctcagcaaaaaccaatgaaaaagaccctaggttgtgcggtccttagaattaagctccctaggcagaaagcaggcagagagtgaattgggagggataaggagtgaataataatggtggacaagcacaccagaatttcaatttatttttcataaactacagttcttgctagtattgtaaagtcagaatttaacattttaaaattcaaataatccctaaaactgctgtaaggggccccagagttttacaaattgaaacttggatctttgagttttaactatgttagaggactgatatggattggagttggatatttgactctgtactgtattttatgacttatgtgctttgtgagaatagcctttaaaatttatgttttgcttttgaacagtaaaaagtccatttttccatcaaacaggccatcactaatttagatatagttcttaacagagaattctgatttaattatcaattttagagtttatatcaataaagtgaaaaccgagtaatttacagaaatctaatttacttcttagacatgtacatgttttcgaatgaaggttattgtagaagaatccactattatgatttagcaaaactgagagctttatttgaaaagtaataattattattattataattttaaaataaatgtgccctatttaaaaatcatcctattaattatactactgtgaatattttacaggtattttcagtcccagcttggctgcatgaactttcatgctgaggtctagtgttagcattaacgttagataaatgctgagtagtatttagtatttgcattttaaatagtctttttctgaatcctaagatgttccaaactgccttttaagaattagctagtatattatgatactgaacaattccgttagaagctatcaagggtctagaagatttgtttctcctaaaactaaacttgaaatttcttggagtaaaataccgtagtcaaaggtaaatagctagaagccttctttggctggtacaggccattgaacagagtaccttaaaaacaactaatttatacctcaatagacattaagttggatacaaagtgaaaatataattcataagtataaaacaaatgaatatttgctgtatattagaagtaatatactgcaacctgcagaaaataaaaatattaggccaggtaaaattaaactcatgtttgaaatattccaaatggcatgactaatgtcaacatccaaaaatctcattcattcaacacactcttaccaaaccacggcccattaaaaagcaaaaaataaacagttcaaagagacaatcaggaagcacttgacatcatgattcgaccacaataaaatatttatgattttttctctcattcaggaaacgatttgataccatcatggagtgaatagagttggaagcaaggaaagagtattgacgtcaatgcttatcatattagtgaaataaatatggagaggatagttagagaatcttgtgataatgaaacaagtgcacatttattttgaactaacacaccaggaaaatttgagagttttatttgacagttgaaacgtaaaaaaaaaaaaaaaattcttacttcatattaggaaatcaaggtattagctctattttttttagaaaaataatcttaagtattattgcctaattttaaaacatttataaattctctcataatcctccctatcttggaaacatcatggatgtcagtgtattagtattagatcttctatttcatttacccaaaaaaatagggggtattattgtaatggaggccaacagaactataaatattatcaaaaagaatagcagagagatgctaggggtcaaagaaaactttacttctctctaattttgctctggcaaagaagaaatattaaattagttaacattttaaaatataagaaaaggaattcagcagtatgtaactctaggaagataacacgatgatcagtgtcaagattacctcagttaattcaagtcactgtatcaattcttatgacgtgtctcttcctgaggaattgcagttatctcagtactgcagctgtcaggagcacacactgtttttactctctggtttcttgctttcaggaactggatgaaaaggtaactactccaaaagagttaaggaccggaaagccatctttcttgttgacctttcatatctgtgtgcaacatgtactttaagtgatagcgaatatttgagaaatcatgatggatcccaaatcttgtgaatttccaaggatgtaatgaaagaggaaatattttccaagactgaaggtctttctctattccttggctggtaggtacaaaaaaatacgttataggaagcaagagaaatgcctgcttttgatgtctgaatcccaccatttgaaatgcattcctctggattattaagataataggtgagtttttgagatttttttttttcctcaatggatctgtcattagggaaaagttttccacagaaacagatatacttgataggaaggaaaatacagaaagacataatccataatcagcaagactagcacaaaacacacagttgaggtaggaggtggggactcgactcttgaccagattgaagaatagctgaaacaaggaagaggtgaaagcatctctccaggagacacatccaccagtgccatctcagttttccattgtcatggcaacacccagagtttaccacccctttccaagccaatgacctgaaaaatacaagctttttcctagaaaagtctgaacaacctgccccttaatttgcatgtaattaaaagtgagcataaatttgactgcagaactgcccttgagctgcttccctgggcacatgggctatggtgtaggcctgctctgctaggagcaggacctctgctgctgctgcgcactgctacttcaataaaagttgctgtctaggctgggtgcggtggtggctcatgcttgtaatcaccgcactttggaaggccgaggcaggcggatcacctgaggtcgggagtttgagacgagcctgaccaacatggagaaaccccatctttactaaaaaaatacaaaaaaatttagccaggcatggtggcacatgcctgtaatcccaactacttaggaggctgaggcaagagaatcatcacctgaacccaggaggcggaggttgcagtgagtcacgatcataccattgcactccagcctggacaacaagagcgaaactccgtctcaaaaaaaaaaaaaaaaaaaaaaaaagttgctgtctaacaccactggattgcccttgaattccttcctgggcagaggcaaaatccctcccatgccgagtctcaatttgggggttcacttgcccttcatcaccatcagaggggctctggtcaggaaaaatggcaagccgagaacgtcaataaaaaggagagaaaaggaagatattgccaagtgaatgactccatgataaaatcttaaggccaagtgaaattgtaaaagggtttgctggaagaaaagatttcagaacatgaattatattagcatgagtcctatctattggttgaattaaaagcaagcaagcaagcagtaagtttctgggaagatggttgcagcagtgacacaggttttgaatccctttataaaaataggtagaacagtaagagtaggaaaaccaaaaaatcaatgataaaatgatatctgagcaaagacataaagatgaaggggttacataaagataaagatgaatactggagtaaagagtaatccaggcagagtgaaacaacacttgcaggaggcctgatgcctggagagagttttgtgtgtcccagaccttgaggaatagtgcagctaatgcagaggaagtgaggttgggaggcaggggatgaggtcatttgtagtagggaggccaactcctccctggactttgccttgtattctgcatgcagcgggaagccatagggaagttttgaacaaaagactagtaaactgtgcttgacaatgattcctctagctgttgtaatatgatatatttatataaacgtagaaaaagggtgagatgggcgaggcatggtggctcacgcctgtattcccgcactttgagaggccaatgcaagaggatcacctcaggtcaggagttcaagaccggcctggccaacatggtgaaaccccatctctgctaaaaatacaaaaaattaactgggcatggtggtacgctcctgtagtcccaactgctctggatgctgaggcacaataatcgtttgaacccgggaggtggaggttgcagtgaaccgagatcccgccactgcactccagcctgggtgacagagtgagactccatctcaaaaaaaaaaaaaaaaaaagaaaagaaaaagggtgagttgatacacactaaatgagttgtagtttcaggggacagaaaaaagaaaatgtatgttttagtttttattttttcccttttttcctgcaactcttgacttattttacttttttcagtgagaatgcattactatcctaataagtacagtgcaatgtatatgtcttttaacttcctgggttccagctcacatgtgttacataaaccctccccagctacccttttaagtagtcacttggaaactcttttgtgttctcactttacctgggtcaggcttcttattcttggatggtgtctgttattaaacagggttttctctttctaatctaaattctcttttccagtaatttctctctcctggacacagtggctcaaacctattatagccctttgggaggtcaagatgggaggactggttgagtccaggagttcgagataagcctgggcaacatggcaagatcttgtctctacaaaatataaaaaataagctgggcgtggtggtgtgtgccggtagtcccagctacttaggaggatcacttgagttttggaagttgagactgcaatgagctatatttatgccactgcactccagcctgggcaatagaatgaaaccctgtctcaaaaagaaaaaaaaacaaaaaacaaaaacaacaacaacaaaaaacacttctctacaacttattcagttgtaattattaggaaatacagaaaacgagcttaataattttcctataggacatctcatcaacttgctgtagggaagtgctaaaaaatgaagaagtctaaagataatttacaaatttcacaacttcactaaaggctgacgctgcatatcaggcaggggtaaagagtggcagtaagaggaagaaagaagcaatgaaggaagtacagtgggaacatgtacttaacttggatataaaaagaaatttgacatgttaggcaatcttaaaaaatcacaggtgattgacaccggaaggttattgagaaatgcaaggtcccagtctaccactaatggcagcacccatgaaggacaattgagaaattcagtctggagagggcttaacgccctcttactggtttcaaaatggtctgcttctgtaacaagaattatttttagaaatgttatctcatattttccattcttttattatttctgttccttctaattttacacctgactgctctgagtgggtgtgtttgtaggagggggtggaagattaaagaaggaaatgctagtttcaaaacacaaaggactaaaaatctcttagactcaagtattagaagctagcaatctctctttccactaaaacattctgctaccattaagtgaactgatgggactcttaccacaaaaggaaaacacttaataaattgcaaactattacagaaattttttaataaagagctatagcttttaaaaataaataacggtttattgatagtgcttgctgagaacctagaaggcatggaagatggagaaaagaggagaataccttttctttcctttttctcttcttctcataaatgtcaagtgtgcctctcactaaagcaatagtatctcatcatcctaagaaatgcttgttataatttaaaacctgactaagaaaacatttatattttagcttatgttacaaacaggactgggagtgtatagaataaagaaatgcttttctgtccttcagaactatctcatggaaaaacacgcaaatacaaaacctatattaaaatatgaacggaactaacaagaaaatcacaaatgttgatggaaggcagagtgatcagaacaatgtcagtgtgactgagatagataccgtaggtagggaaagtctgtcaaaatttaaaataaatgcattactcaagaatgatgaatttttggcttctcctaaagtcactttttttcctcaagtagaactgaaacccaggaaaaatatcacaattaaaaagtctcataagttttcttaagcaaaaataataaccacaactactaccttaaagtttgttaagctctttctaatttccagaaacaatgctgagtctttgatctgcttttagtgaattgattcgctcaaaaaaacaatataaaacaagaactgcttgcctctacctccaagttttacaaacggcaatcttccaactggctgtgtacattcctgtaggtttctaacatgagctgtaggggtatgagaagaaaataggaaagaggttcatttcaatttttctttatttctttcattaaatttttgtgtatatgagatataatatgcataacataataagtgtatatagtatgtaaatataagaatttacattcttatatattctgttgtgcttgaagtatgtagtggtaggaatgtgcaatccaagaagttttaagaagaacgtttcagctattaagacatctagcttctgtaattcagaccacctccaaagttccatatacagatatctttcaaaaattcaccatgtctattttttattttacacacatttttgtcaattttatttagtcaaataaaaatttccttataaaattgtatttccacttcaattttagaaaaataattagtaactctgctattgtagctactcaaatacttgtagatttgttctaaattgcgaggggaaaaagggactactggaggcaaaatgatgttagcaagaagtttgaactgatatggatgaaaatatttttaaaaaacttacagaaaccaaatattaaatctttaaaatattctatttggggccaattaatatgtatctcactttattgcagcacaatatatcaggcaataaacaaaatcaggatctttcataatgaaatgtcccctttctgctcagtattttctgtttaataaaatagtaagccaggtgttatggcttatgcttataatcccagcactttgggagtctgaggttcgcagatcccttgagctcaggagtttgagatcagcctgagcaacacggcaaaacttcatctctactacaaatataaaaattagccagagtggtggcacatgcctgtagttccagctactcattgaagctgaggtgggaggagggcttcagcttgggaggcggaggttgcagtgagctgtgatggcaccactgcactccagcctgggtgacagagcaagaccctatctaaaaaaaaaaaaaaaaaagaaagaaagaaaataataatctgaataatgtatataaaaggatatcaatcacaatcactaagtgtattaattacaaggcacaataacaattatattgtattcattttctattatcactgcaacaaattactacaactttaggggttgaaaacaacgcaagttcattgtcttacagttctggaggtcagaagtcttattaagtgggtcttacggactaacatcaagatatctgcagagctgcgtgtcttctggaggctaaatgggagaatctgttgtcttaactcttccaaattctggagatcacatgcattctctggtttgtgatccctttctccatttgcaaaacacaacacttcaatctctacttctgtcatgacatcattcctttttattctgaattactgcctaccgcttataaagactcatgattaattgggaccagttggataatccaggataatttccccatcgcaaaatcctagtttaatcccttttgcaaagcccgttttataatgtaatgtgatgtattcacaggtttcagggaaaaggacatgacatctttgggaatcattattcagcctgctccacaggatgcaatctggccccaaaagattcacgttcaccccacataaaaatacacttgctccttcccaaggtaccccaaagtctcaatgcattacaccatcaactcaaatccaaaatctttatctaagtcttttcaggtcaaattctcaaagtcgctgcagttccaaatctcatcatctacatcacctaaattaggtttggatgaggttctgggtataaagcataatggggaaaaatttatctccatctgtagacttgtgaaactaaaaaacaagttatctgctcccaaaaatgcaatggtggagcaggcataggataacagttatggacatttctgatccaaaggagataaaatagaaggaaaaaagaagtcacatgttccaagcaattttaaaatccagctgggcaaataccacaagaatccagtttctggaaataaacctccatagcttgagtatttgccttttgggcctgtggctctgcccttggtgttatccttgctttttttttgaagggtatttgcggctgagtagttttatcagcctgtttcctgccaatagccagggaccggggaggtggaaggtgggggtgggggtggaggtgtggagggtgggggtgtagggtgggggctggagggtgggggggtggaggggtggaggatgggagggtgggggttggaaggtggggggtggtgggagtggagtgtgggggctggagggtggggatggtggggtggagggtggggggtggaggggtggagggtggagggtgggggtggtgggagtggagggtgggggctggagggtggggatggtggggtggagggttgggggtggaggggtggagggtggagggtggtgggagtggagggtgggggctggagggtggggggggtggaaggtgggggcggaggggtggaggatggggggaagtggggtggttccgcagccttctttcatttcatcttcactttgtccctttctgtacaacctgcagtgtttgcgttgttataacattatcaaaagctttatggatctcccatttatatctggagattcacttcattagacacaaggcttcttcaccaatgttttctggataatcacatctccattcttggcttctgctgagatggctggtggaattcattatccacacgcctaatctcttcaaagatccttttatttgactgaatactctttcagatccttgtcaggcactggcaaagtgttatccagctcgacccttgagtttctcttcagagctcatgttcctggcaataaaactaattttaggatattttgaagtctgtagaggctgataatttctcaaatcataaagtcctggttcctgtttgcttaacagacttttccttaacttatgctttcctctcatcctttatcataaacagtgagaaataattgggttgccccttctacacagcttggaaatctcttcaggtaaatatccaaagtcatcatttacaagtgttgctttccacctaacctcatgataaaatttggctgcatttcctgtcactacgtagcaaggatgccttttcctccacttcacaatacatagtttccgtcgccttctgagccctcactagtagtgttttaacactcatctttctactaaaactctatttgtgatgatttagttactttctaagatgatacagctttactatactcctcacttctgtctgtgtcttcaccgtcagcaatttaacgaccctgtttacaatgatctagacattctttaagataatacaagtttttttcctactatactcctcattattcttccagcctctgccccttacccatttccaaagccagttctacatttttggcatttatttcatatagcaactctccatttctagataccaaaatcgatttaccattttttgaatgtctcccattttccagaattaagctaagtgctttataaacatcttaattatcttaacaactacccaaggggcacattattatatatattttacagatctgaaagacagttcagtatgatttaaaaatgtcagtctttggccccaggcagatgttgatttaaattctgatttcataacactttagctacatattcttgggaaaatcacttagtcttttaaaattttctgagcttcagttgcctaaaaactaaaatagtagaaataaaccctactatagaaaacaaattttattgccttttcttttatacattttttttctttttcttttttgttgttgttgaggggtacatagatatgcagtctgcttgccttaatgggcatgcaataggtgttattcttgatgttgttctattctgttgtcacctatggaattaattcatatgaaaaagaatattaccagaggagaggaaatatacataataaagatgcctggtaaaggagaataaaataggtatatttggagagacttaggctaatgtagctgatgaaagtttctaaaagttctgtggtgactgaaatgcttactggctccctcaactttccattgctttccttgaggataattaatagatatcagatatatcatgaattaattagggaaaagatggtagagtcagcaaagtttttgtttgatgaaaattcagatgtggaggagctctgtatttctttctttcttttctttttttttttaaacagagtttcactgtgtcgcccaggctagagtgcagtggtgtgatcttggctcactgcaagctccacctcccgggttcacgccattctcctgcctcagcctcccaagtagctgggactacaggtgcccgccaccatgcccgtctaattttttgtatttttagtagagacggggtttcaccgtgttagtcaggatggtctcgatctcctgacctcgtgatccacccaccttggcctcctaaagtgctgggattacaggcatgagccaccgcgcctggctggagctttgtatttctaaggaaatttagtgataagtcctgaaatcatcttgaacaatgaaaaagggttattataatcggtagttacttctaatttgtgttatatccttctaaagtagtttacttaataaaaagttccatatttggtttgtcaaccttggggatttaacacttcaattaaaatgtgatacttaacataaaaagagaaaaaagaaagagagggaacctctgggtctatatttattacttgcctcctcaataaagaaagaattgtttaaaacagtttattttaacataaaccaacccaggcgtcatctcagagctatctctttggaatttgtctgcaaatagaagttttatcatttgtcttttgaaaagggcacccaagtaggaagaacagctgtagtctacaattttcaaacttcataacgtaatttgttgactacttttttcaattaagttttatgctgtcagatagtgaggtggttaatttatatatgtttgcataaatatatactgtgctggaaaccccaaattgtcatcatttttataggtttaaaataagatttactgatgaaactgtttcctttctttttcatgggaaaggaggaatcatgtgaagaatttggacataaaatagaccaaaattcaaattccagttctatcacgtactctcttgtacctcggatcttaactttgttgagcttcttactcatctatgaaatgggtgtaataatacatttaaatgagataacatacagctcctggcaaataatattttctcagtaaacatttttgttattctttattttcatagtctctgttacaagtcaggtaaattatctctagtcctacccaattgccaaaccagtaaatataagttactggggcagttcagaattttcaatcatcctatggccttacctccaatttttctctacacatatatttcctttataccactaagcaaaattagaaatgtcttggtttatatatttcttcccatgctttctgtctctacaaccagaatataagcttcagaacaagagtattcaaatctggtgtgtttatccccagactcacaacactgggtccagagcaggtcctcagtagatgtttataaatatcaggatgtattacatatattaactttttatgagtagttattatttattatattccacttagatatggaattattacttcaggtggtagctgacttgtactggaaaagtgactgagcccaactctaatgctaatgttaattggatttatatgaagtttctttggttttaattgcactttgaatgaattcaagaatttcactagctataacttctatctatggtaagaagcgttgtccaagccacagaacctcaagattacaacagagatttaaattaaaactcttctaattgttattattgtaattattataattcaccaactggacaattggaacaataaactcttggaatttaaattaagtatggaatggggatggatgtttggggtgctttatagtttcctgtctccatctctctcagtggcctcttactctcaaatagcagtggtaattcttcttggatcattaacctaaaagagtctcaggaatgctttgtgaccattgctaccgaaatataactactcaatatgagtgggagataatgggtctggatatgttggccacatacataccaggtggaagctaggcctgggtaggaaccctgaaaaacgctttgcaagaaaattcaatatctttgaattacaataactttcaggaattctcattccatttagaatgtagacaaaggctaataaccaaactgaggtctctccctgaccattgaaggctggttctgggttctgcagggtgccctgccttgcaaagctctgatgtgctctggtttcccacattttcccacatcagcgctctgtttgcccacattttcctttctgtataactggatgaagaccccattactgagttttaatcagaacactacctctacatgcctggctagggtaaaagctatttctcatagtcagttcttccaattccagacatagaaaaatcacaacattctattttcccagaaggaatgaagtccatctcagccaactgctcttgacatctgtctccatctgtattagtctgttttcacactgccataaagaacttccctgagactgggtaatttataaagaaagagatttaattgactcacagttccgcatggctagggaggcctcaggaaacttacaatcatggcagaagggaaggcaggcacatcttacttggtagcaggccagagagagaaagagtgagtgaagggcaaagaatcccttataaaaccatcagatcttgtgagaacttactcactatcatgagaagagcatgggggaaaccactcccatgatccagttacctcccaccaggttcctcccttgacatgtagggattacaatttgagatgagatttgggtggggacacagagccaaactatatcactattttttgggtaccttccatttctttcagcaaagttagattttttttggggggctttaacatagggttcctttttggatgttccaccaaattactatgacattacagtaatataaactgagaaaacagatcagcaatagacagaagagtttgttatgttttgtcttttttttttttttgaggtggggtctcactctgtcacccaggctagagtgcagtggtgtgatcgcagctctctgcaacctctgcctcccaggctcaagtgatcctcccacctcagcctcttgagtagctgggaccacaggcatgtggcaccatgcctgactaatttttgtggttttggtagagatggggttttgccttgttgcccaggttggccttgaactcctgagctcaagcaatccatttgccttgacctcccaaagtgctaggtttatttattttttaagacattttaaattaatttcagtcaaatacattttagaagaagatcttatactgagaaggtatccccaggtcttttttatccaaaattgcataaaacctcatttcttttcactgcacaattattttcagtgtgcataatattcacccctaaaaaaattataatgatatatgtaatattggtatagaatgctgtatattcaacttaagaaaacgtacaattgcatttgtgaactaaataacacgttactaacagtttattttcacttttttttttttttttttttttttgagatggagtttcaccttgttgcccaggctggagtgcaatggtgtgatctcggctcaccgcaacctctgcctcccgggttcaagtgattctcctgcctcaacctcccaggtagctgggattacaggcatgcaccaccacgcctggcaaattttgtatttttagtagagacagggtttccctatgttggtcaggctggtctcaaactcctgacctcagttgatccgcttgccttggcctcccaaagtcctgggattacaggattgagccaccacacccgacctattttcacttatttttgtctttgtcttgtgggttgacttgtcctgcatctatttagcccagtaaatgttgctgttctacttttcctggcttcataatccacttttaggttctagctgcatctcaaataaatattggcaaagcaattcaaatccttaaaatgcctcagcagattgatgcattctaagctggagaaaaataaaaacagaatcatacatcatgtttatcagcctttgccatagagttctttgactataatgaattcattgagtcaaacaactttttccatgtctctctctcactctgaaatctggctaaataaacgtgatgtttaatatcttgcaagtatatttgcatgtgatggtagtttcctgtgtaattaaaaaaatggggaaaatgagcttatatattggctctgatagaacatattatggtggtaaatttgaaggaagctgaagggcaaacatagctgttgacttggcaagttgtcatgactaagaaggtattctgggacctatactcagtaaaaaaacaataagccactctcagcctagattttcttctttggaggacttggccgccagtgtcatttgcaaccaagaaaacttttataggtctgttcttatcagagccttcctttcatgaacaggcaggtcagtcaactcatcttcttttctcaacaatttagtgaagtcagaaagactgaaagacaaagcaaaaagaaagccagagttacagtgttttagataagctaaagcatttattgtttcaccatagcggtggctgatgcagatatatgtagctaatatctttaaaattctggttgattccctttctggttggttgcatacctttcccagtgtaacttctcagtgggagtaaatgatgttcatctagaccaaagatgcaagctatcatttctgtttccttcccacataggtatttgtctttgttttgcaagattttctttctctatccctcaatttaaaaggcaaattccttaaaaatccatggacaatttcaggtgtatagtgcatggttcaattgccccagaggataatgttgaagttgctttgcagaggggtgcaagagaaaggggggtgtaatccaagataatagtaaaagccgataagcattgccatttcaggaaactctgccacataacttggcagtttgaaaatttagccaacctttttatagggaggtcattaaattccagtatttcatacatattgtgcttcaaagcaggcaggtattcattatttttacttcattttgttttattaaaataaatgcttcagaataccttatgcaaaacaaaatccaaatacatttttgaaaacacatgtatactttgcttctaaactagaaaaaaccatattgctggtttaggtgacaattcaataggaagtgaaattttttaatctaatacatttttaaaaagctgagagtttactagtttcatatgtattttgccactaaatccctcttcattaaggatatttattgcaaaataatcatctttagaaaaaggaggtagatgtcttgattttgaaactgaacgataacatgaaactgaataacatgcataacctttacatttagaaacaaattgctataattgcctcttgaacaacaaataagcaaaaataacattaaaattaaaatattgtaatatttcttttaaaattattttcctttttttgagacagtctcactctgtcacccaggctagagtgcagtggcgtggttatggctcactgcagcctggacctcctgggctcaagtgatcctcctgcctcagcctcccaaaatgttgagattagaggcatgagccaccgtgcctggccttgtaatatttttcaaaaaaccgcttcttaaaccaggaagagaaaaagatatgcatcataattcagaatgcagtgtgtcaaatgacttaattttatttgatctgcagcagaaaaatgtaatttcttatttgagattctttgatgttgccatttcacttttgcctttcttgttggctaatagctgggaattatttcctggaaaagtatctgatccattaaggaaagaatatgaccatgtttcgtggaaattaaaaagtaatgtagacaaatattcatagaagatacaagtgtgaccctaaagttagtatttgaatgttgttctcctatttctgattttattgacccaaaatatcaagctaggtttatccatgtttgcgtgtagcattttaattacttagcctaagaaaagatggaattgaatttcaaatgtaaagcagtaggaaaaaaaaagagagatttctctttaggttttcaaaaatgtatttcttggagcttcttgattttggcagaatgagcaaaaacaggactgagaggactgaactaactattcttgtcgttgaatgtgggagttatttctgtttgcttcctctacaaaatcagtttctccaaccacatcttgagaagttttcctttgcacaacatgtttgacaaattgccaagcaaaggcattgaagaatctcggcttcatcctacaacctttttcttcatctcagaaccttcaacctacaactttttcttcatctcagaacacgtcttagaagatatgagtctccaaaatagcagaggggaatgttttacttaaaaaatgtgtgtgagatcactgtacataaagttattcacatgataatggatacagaactccattgatgaaaaacgttaggaattttctcatatatttaaatgtttgataagttattttctttattttggtgaccagaatgcacacaaatggttgcataatttatgtagatatatgcaaaagctctgccaacaggtacttgtgggagaatcaaagtctgctctatccatgcattccttttacattccttttacttccacctccacttcttatttctttctttttttttttttttttttttttggagacggagtctcactctgttacccaggctggagtgcagtggcacaatcttggctcactgcaacctccacctctccacctcccgggttcaagcaattctcctgcctccgcctcccgagtagctgggacgacaggcccacgctgccacacccggctaattttttgtattttagtagagatgggttttcaccgtgttgcccaggctggtctcccaaagtgctaggattatgggcatgagccactgtgcccggcctcacctccacttcttaacaagtactctatgctctaagttcattattttctcccactgggctccctttgctattgtacttctactcagttattgctcccgtttttattatctgcctccttattcttcttgtaaccgaagcattctctctgtaggtccaaaataaagtccaaggactagcagacactttccttttcaggacacaatatgttatctcatccctggaatacctaggatacatcgcacactccgtgcacggtgtgtgtgtgtgtgtgtgtgtgtgtctgtggtctgcgtgtgtatgcttctttgttatgcattgttaatttctttcactacaagtattttaagttttttgaacaaaaagaactatatttcaataatagttatcatctactgaacatctgagagtagcaacaaatgttagagtgaacattgtaaaataattaaaaggaccaaattacactttcttacctgccttttttttttttttttttttgagatggagtcactctgttgcccaggctggagtacagtggcgtgatatcggctcactgcagcctctgcctcctgggttcaagcaattctcttgcctcagcctcccaagtagctgggattacagaccacgcaccaccacacctggctaatttttttttttgtatttttagtagagacagggttttgccattttttctgtaatattgagtagacatctggcccattcacatacctaatagtaaatgttataatgtaaaaaaaaaaaaaaaaaaatactagtttctacaaatattgtctcttttacttttatagccagagaatcactttcttatagttagatatggtattgtaactagttctggctaatggaatgtaagcaaagtgttatgtgcaacattttttcaaaggtttagggcaagatcttcatcctttatggctggggtacaatcaatcatttcggaccagaaatgaacatgggatctgcatggcttcatattatcagccatggacaatatcatttgagaaaaggattgttaaaaattaatcatagaaacaaacaaaattttattctattttgtttaagccactgttagtttgggtttctgagattcactgctgaatgttattctgatacctccacttcaacctacgatgtgtaattcccagtttacctgggacagtcctgaattacagtgatgtcttgtaatttttctgctacttcccaggaccctcaaaagtacctggcttaggtgatatgttatatagtgatgcttcttaattctctagactccgaatgttattagctacagcaacatttatcgaagtaacatttttcctaggagtttaaatgtaaaacagctaaagacaaagttactctgggtcagacatgtctggaagagctacagttctccctaatacctacagaccacaaactgggcctgaactggtatctatatatgtgtgtgttggtgggggtgatatctatttattcatttgtttattttttttccactggataggaatttctaacaattaaaatatgttattgttcttagagctaaacataatgataaatgtaagggagacataaggaagatcctacatatagtttttgtttgtttgtttgtttgtttgagacagagtctcactctgttgtgcaggctggagtgcaatggtgtgattttggctcactgcagcctctgcctcccaggctcaagcaattctcctgtctcagtctcctgaatagctgggattacaggtgcgcactgccctgcccgaataattttttgtatttttagtagagccaggggcttcaccgtgttccccaggctggtcttgaactcctgagctcaggcaatccacccgccttgatctccaaaagtgctaggagtacaagcatgagccaccgcacctggcccctggtgtatagttttagagactccttttcaattgtgtcagaagtgtttgaaccagagcaactccatcttgagtaggggctaggtaaaatgaggcagaaatctactaggctgcattcccagatgcttaggcattctaaatgatggatgggataggagatcggcacaagatacagttcataaagaccttgctgataaaacaggttgcaattaagaacctggctaaaacccaccaaaaccaaaatggtcacgagagtgacctctggtcatcctcactgctacactcccaccagtgctgtgacagtttacacatgccaaggcaacatcaggaagttaccctatatggtctaaaaaggggaggcatgaatactccaccccttgtttagcatgtcatcaaggaataaccataaaaataagaaaccagcagcccttgggtctgctgtgtctatggagtagccattcttttattcctttactttcttaataaacttgcgttcactttactctctggattctccctgaattcgtctttcttgagcgaaagccaagaccctctcttgggatctggattgggacccctttcctgtaacaattgtgtcctattacattcagccaatttagcaaattgatttatgattcttacatatccataggataagtatgtggattatcttcattttgttactgatgagaaaatggacacttaaagaaattcagtgactttccagggttacataccatctgactaaatggcaaaactgaaatcaagcccaaatacactctacctcctctcacaaattttggaaacatttaatccaatccttaaatcaacagaggatcaaactgaggcgcagggattgctgaaatagacaaggagtaacaaagtttgccccgttagagccaaatgatgagcttctggccttttgaaaagtttagttgtaaaatagtccctatgagtaggaaggaagacacatttttatttagttttatgtaaatggtgcgagacaaattcagccttgcctaaggcaactgaaaaaccatctttgagtgaattattcctttgaagctttatcttcaaaaggcactgctactctttaactttggcaggaaaggggaacacctgcagcaccgttgcataaattggcttcgttggacctccttcatcagccagagctggagacctacgtgggttataatgtctggaaagggcaaggtggtggcctgagtagtctgaagtctgttattctggtaatggttccctacttagggtatttctaactatgaatcaggccttcaggagaaatattactaactggaaatattgagggacgtggagacaagatgtgagcctacagcacagctttccttccagtgcgtatggtacataggatgcccaagtgcgggttcaaatatgctgagatgttgattcgctcagcccttgggatggatcttgcaatgagacttgctcagtctcatttgtttttcccgagtacagggtaccatgtacctaaaatcgtttgcttgttactctgggatatcatgggaagccctggcctagggcatctagaactacatgcagctagcatgtggaggactgaaagaattctctgaaccgaagagcatgtgatttggaatttttaaacatagtttctgtaaatatagatggagtcttccctgcacatataaggcatatcccgtggatccaaaggggtaactatgtgatttgacagcaaaagtggatgtgatccacaaagcagagaaatacggagccaggtccaccttggaaaaacaggaacacatatccacactcagtacgcatcctctctcatctcacgactctcatcccagtcagagttgtctgaatggacaggattactggcaaatatttgctatgatgaagatttttttcccatgattgctaatattttatgcctcaatcccccattcctccccaccccagcaaaccaagtccttcatgatgtttccatggctcttgcagttcctagacaatctgtttggcttccccatccaagatttttggagtggaacactggaatataggatagcatcacaagttagtcaagaaagtcaataggaagtgatgtttatagctgggataagatgtccttttaggccacttaagctttgtacatggacctgcactgtgtgtatttcatagaacagctaggtagcatttcccatgtcgtgtctaccacatgttggatgtcagggtgggttgaaatgctttggatcagtatttgtcaaattatgatctgtcgactaccatcttctaggactaatacattaaatatattttaaaaaattggagttatatgtttaagtaatggtcaggattaattctagggatagaaagttctagggataaatattcaagactaagtagctgagagacacaatcaagaacagaatttttttctttatttttttaaactacactatgttttgtgtgttggcttctctacatttccctcatggttactagatgattgttatgtctctatgactgcatcttccttccagagaggagaaaagaggaagtaaaaaggggttaaaagtcatgttagtggagtctttcccttttatgagaaaaacaaaaaacattcctaggaactttcctcttaagtcgcactagacaggatttagtcacatggctaccatcaatacatctttggaaaagggtaacaagattaccacaactagtcatggccagggtgaccacctgcctatcaaagatttctgtttctttttcatggtgtagaatggttgctaagaaggcacacttccaagcctttcttttttttttttttttttttaattttttttttttttattatactctaagttttagggtacatgtgcacattgtgcaggttagttacatatgtatacatgtgccatgctggtgcgctgcacccactaacgtgtcatctagcattaggtatatctcccaatgctatccctcccccctcccccgaccccaccacagtccccagagtgtgatattccccttcctgtgtccaagtgatctcattgttcaattcccacctatgagtgagaatatgcggtgtttggttttttgttcttgcgatagtttactgagaatgatggtttccaatttcatccatgtccctacaaaggacatgaactcatcattttttatggctgcatagtattccatggtgtatatgtgccacattttcttaatccagtctatcattgttggacatttgggttggttccaagtctttgctattgtgaatagtgccgcaataaacatacgtgtgcatgtgtctttatagcagcatgatttatagtcctttgggtatatacccagtaatgggatggctgggtcaaatggtatttctagttctagatccctgaggaatcgccacactgacttccacaatggttgaactagtttacagtcccaccaacagtgtaaaagtgttcctatttctccacatcctctccagcacctgttgtttcctgactttttaatgattgccattctaactggtgtgagatgatatctcatagtggttttgatttgcatttctctgatggccagtgatgatgagcatttcttcatgtgtattttggctgcataaatgtcttcttttgagaagtgtctgttcatgtccttcgcccactttttgatggggttgtttgtttttttcttgtaaatttgtttgagttcattgtagattctggatattagccctttgtcagatgagtaggttgcgaaaattttctcccatgttgtaggttgcctgttcactctgatggtagtttcttttgctgtgcagaagctctttagtttaattagatcccatttgtcaattttggcttttgttgccattgcttttggtgttttggacatgaagtccttgcccacgcctatgtcctgaatggtaatgcctaggttttcttctagggtttttatggttttaggtctaacatttaaatctttaatccatcttgaattgatttttgtataaggtgtaaggaagggatccagtttcagctttctacatatggctagccagttttcccagcaccatttattaaatagggaatcctttccccattgcttgtttttctcaggtttgtcaaagatcagatagttgtagatatgtggcattatttctgagggctctgttctgttccattgatctatatctctgttttggtaccagtaccatgctgttttggttactgtagccttgtagtatagtttgaagtcaggtagtgtgatgcctccagctttgttcttttggcttaggattgacttggcgatgcgggctcttttttggttctatatgaactttaaagtagttttttccaattctgtgaagaaagtcattggtagcttgatggggatggcattgaatctgtaaattaccttgggcagtatggccattttcacgatattgattcttcctacccatgagcatggaatgttcttccatttgtttgtgtcctcttttatttccttgagcagtggtttgtagttctccttgaagaggtccttcacatcccttgtaagttggattcctaggtattttattctctttgaagcaattgtgaatgggagttcactcatgatttggctctctgtttgtctgttgttggtgtataagaatgcttgtgatttttgtacattgattttgtatcctgagactttgctgaagttgcttatcagcttaaggagattttgggctgagacgatggggttttctagataaacaatcatgtcatctgcaaacagggacaatttgacttcctcttttcctaattgaataccctttatttccttctcctgcctgattgccctggccagaacttccaacactatgttgaataggagcggtgagagagggcatccctatcttgtgccagttttcaaagggaatgcttccagtttttgcccattcagtatgatattggctgtgggtttgtcatagatagctcttattattttgaaatacgtcccatcaatacctaatttattgagagtttttagcatgaagggttgttgaattttgtcaaaggctttttctgcatctattgagataataatgtggtttttgtctttggctctgtttatatgctggattacatttattgatttgcgtatattgaaccagccttgcatcccagggatgaagcccacttgatcatggtggataagctttttgatgtgctgctggattcggtttgccagtattttattgaggatttttgcatcaatgttcatcaaggatattggtctaaaattctcttttttggttgtgtctctgcccggctttggtatcacaatgatgctggcctcataaaatgagttagggaggattccctctttttctattgattggaatagtttcagaaggaatggtaccagttcctccttgtacctctggtagaattcggctgtgaatccatctggtcctggactctttttggttggtaaactattgattattgccacaatttcagagcctgttattggtctattcagagattcaacttcttcctggtttagtcttgggagagtgtatgtgtcgaggaatgtatccatttcttctagattttctagtttatttgcgtagaggtgtttgtagtattctctgatggtagtttgtatttctgtgggatcggtggtgatatcccctttatcattttttattgtgtctatttgattcttctctctttttttctttattagtcttgctagcggtctatcaattttgttgatcctttcaaaaaaccagctcctggattcactgattttttgaagggttttttgtgtctctatttccttcagttctgctctgattttagttatttcttgccttctgctagcttttgaatgtgtttgctcttgcttttctagttcttttaattgtgatgttagggtgtcaattttggatctttcctgctttctcttgtaggcatttagtgctataaatttccctctacacactgctttgaatgcgtcccagagattctggtatgtggtgtctttgttctcgttggtttcaaagaacatctttatttctgccttcatttcgttaggtacccagtagtcattcaggagcaggttgttcagtttccatgtagttgagcggctttgagtgagattcttaatcctgagttctagtttgattgcactgtggtctgagagatagtttgttataatttctgttcttttacatttgctgaggagagctttacttccaactatgtggtcaattttggaataggtgtggtgtggtgctgaaaaaaatgtatattctgttgatttggggtggagagttctgtagatgtctattaggtctgcttggtgcagagctgagttcaattcctgggtatccttgttgactttctgtctcgttgatctgtctaatgttgacagtggggtgttaatgtctcccattattaatgtgtgggagtctaagtctctttgtaggtcactcaggacttgctttatgaatctgggtgctcctgtattgggtgcataaatatttaggatagttagctcctcttgttgaattgatccctttaccattatgtaatggccttctttgtctcttttgatctttgttggtttaaagtctgttttatcagagactaggattgcaacccctgcctttttttgttttccattggcttggtagatcttcctccatccttttattttgagcctatgtgtgtctctgcacgtgagatgggtttcctgaatacagcacactgatgggtcttgactctttatccaacttgccagtctgtgtcttttaattgcagaatttagtccatttatatttaaagttaatattgttatgtgtgaatttgatcctgtcattatgatgttagctggtgattttgctcattagttgatgcagtttcttcctagtcttgatggtctttacattttggcatgattttgcagcggctggtaccggttgttcctttccatgtttagcacttccttcaggagctcttttagggcaggcctggtggtgacaaaatctctcagcatttgcttgtctataaagtattttatttctccttcacttatgaagcttagtttggctggatatgaaattctgggttgaaaattcttttctttaagaatgttgaatattggcccccactctcttctggcttgtagggtttctgccgagagatccgctgttagtctgatgggctttcctttgagggtaacccgacctttctctctggctgcccttaacattttttccttcatttcaactttggtgaatctgacaattatgtgtcttggagttgctcttctcgaggagtatctttgtggtgttctctgtatttcctgaatctgaacgttggcctgccttgctagattggggaagttctcctggataatatcctgcagagtgttttccaacttggttccattctccacatcactttcaggtacaccaatcagacgtagatttggtcttttcacatagtcccatatttcttggaggctttgctcatttctttttattcttttttctctaaacttcccttctcgcttcatttcattcatttcatcttccattgctgataccctttcttccagttgatcgcatcggctcctgaggcttctgcattcttcacgtagttctcgagccttggttttcagctccatcagctcctttaagcacttctctgtattggttattctagttatacattcttctaaatttttttcaaagttttcaacttctttgcctttggtttgaatgtcctcccgtagctcagagtaatttgatcgtctgaagccttcttctctcagctcgtcaaaatcattctccatccagctttgttctgttgctggtgaggaactgcgttcctttggaggaggagaggcgctctgcgttttagagtttccagtttttctgttctgttttttccccatctttgtggttttatctacttttggtctttgatgatggtgatgtacagatgggttttcggtgtagatgtcctttctggttgttagttttccttctaacagacaggaccctcagctgcaggtctgttggaataccctgccgtgtgaggtgtcagtgtgcccctgctggggggtgcctcccagttaggctgctcgggggtcaggggtcagggacccacttgaggaggcagtctgcccgttctcagatctccagctgcgtgctgggagaaccactgctctcttcaaagctgtcagacagggacacttaagtctgcagaggttactgctgtctttttgtttgtctgtgccctgcccccagaggtggagcctacagaggcaggcaggcctcctggagctgtggtgggctccacccagttcgagcttccctgctgctttgtttacctaagcaagcctgggcaatggcgggcgcccctcccccagcctcgttgccgccttgcagtttgatctcagactgctgtgctagcaatcagcgagattccgtgggcgtaggaccctctgagccaggtgtgggatatagtctcgtggtgcgccgtttcttaagccggtctgaaaagcgcaatattcgggtgggagtgacccgattttccaggtgcgtccgtcacccctttctttgactcggaaagggaactccctgaccccttgagcttcccgagtgaggcaatgcctcgccctgcttcggctcgcgcacggtgcgcgcacacactggcctgcgcccactgtctggcactccctagtgagatgaacccggtacctcagatggaaatgcagaaatcacccgtcttctgcgtcgctcacgctgggagctgtagaccagagctgttcctattcggccatcttggctcctccctctccaagcctttcttgaatctaggtagagccatgtgactaggtgctgccaatagaatatgcatggtagttattgggttctccaggctgaagcagtgaatgagtgggtgtcccctttttccttgttccctctctctctgtatctcactgtgtgtgagtgtgtgtgtgtgtgtgtgtatggaagctggaagaaagctgaggccaggggagaaggtggagagccataagatgttcatgagcattacctgacaagtacccgcttttgttgctgtgtgaagagtaagtgaaatttttattttgttaattcaaggagattttaggggtccatctgttatagtagctacccttaccctaaatggtaccctggtttaggccagtcatgattcatcctctgaaagtagagtgacagggcctattttccttaagttcttgatgtctccctgctcttaacctattaattgagcctctgttaccaggtatagatattataacaatagtagaaagtgtctcccacagtacgtcataacaatttttgtatgcctgttgaaaatacagagcccttaactcttccccaggattactgaattaggctcagctgtctacatatttaaaagtactctaaatgattctaatgtaccctgaatttggacacaactgctccataaggtgtcatggagcagcaacccatggatcatcaatgtaccgtcctcctccagagcattgatgtgctgagaagtagaaggtattagaggcagaagccatcattccttacaagggagaatgggagtagtgggtcttgatgccgacagcagacacagggatgatgtccaccgtaacctggataacgtcataataatgtaacatagtaaatatgatttaaaggaggagtaccttcaaaataagacaggaagaagcctgtcaagtcactcaagctcttctttgccccaaaacagttgcctatgacactttaccaaagcattattacttaaaggttttaaagtaacatagaccagcagcaccaccttgcatgccatatttgagctttttaaagagcccattgcctagtaagggtacatgaattcagtaaggcataggtctgctagacacaggcattcaacgctctggaggagattatatgaaactaagagttgagagtcacttttgagtgatgtagcgacgcaaataagaattttcaaatctgtcaaaatgtaggctgttaagtttgacctggggcactaagtctgaagggttaacagagaagtgatgagccaatgtaaagctgtatacacacgtgcacacacacaggagctgggtgagaatgttcataaagcaacagggaaatgtggttagtgagcacctggcaaaatggctttacaaatgctttccctgagttttaggtagaggaatgtcttgttggtgtaagcatacaaaccaaagagctctgaagtaattcactattgccttgaactttaggtgacccaaatcaaggaataagggatagcttaatttaatgaaagtagaaggtaaaaaaaaaaaaaaaaaaaagttcagtctatttggtaagaaaacctctttggcaaacagcagacatgatgttgctgatggaatctttaaagaggtagcggatttggtgaaggacttgtgtttggcatggaagggctgggcaagaagaaccctctccattgcatagcagagggttccccctttcaagcgtgcttagggagatggagttagtggctgaaacacaaatttaagccctttgaaatgtaatatcctacgccctctggtggttacattttttaaaaatcgtactaaagaaaacaggttgaagaaatcatagaatgccaattacaggaataacagggatcttaagtgtcatttgtcagagctgtattcaagatgcccttatcgttagttaaaggtgtcagcccctgaatcagaaagaaaaaaaaagccttatttaatcagttttgcaaatgcttgagaagtcagctttctcccggtttttctccatcacttttcaggaacttttccattatgcctctgtcgtcagaatacttccgagatttggaagatagtgactccacttgggatggctctgaggtcctgctccttcttggtattttgatagaaaagccttttgccactcaaaggggaatttctaaaagaaacttcaaaccacacaattactttaaaagggtgatcacacagtaatacattgaatgatgcctggccaggatctaacaaacttgtctgtttccctctttgttgtgtctgggagacagaaagacagcctggccattctcatggcaaactgtcattaaattatatcaagtgtaaatagttgtgactgacactgttaacaaagaacaggaatccaggaacaaaagggcacttcaatgaagattagatgttccttaagcaacagattttaaggacctagattccataaaattagagttctgattaagtcttatagatatatgtgtatgacatatgcaagaggacttagataaaaatttcagagaaaaattgaattaaagataaaaattaaaaatacaagctttgtcaacataagcttcctcaagttcaggacacttttgtaagtgatgatacctgccatttagtccacctataaaaaaccgatggtccttggaatttaaccatgtcaatgcagtgttttttccatattagctgaagaaaaataggtaccttaaaattttttgttttaggatcagaaaacaaaaagaagtcagaaggatccagattaggactgtaacatggatacttaatgatttcccattaaaactctcataaaattgtctttgtttattagagggatgagcaggagcattgtcctggtggagaagcactctttggtgaagctttcctgtgtgtttttctgctaaagctttggctttctcataacactcttatcataagcagatgttattattctttggccctccagcaaatcaacaaacaaaatgcctcaagcatctcaaaaaactgttgtcatgatctttgctcttggctggtctactttggctatgactggaccacttctatttcttgggagccattattttgattgtgctttgacagcaggacacactaataaagccatgtttcctctcctgttacaattctttgaagaatacttcaggatcttgattctatttgtttaaaattttcattgaaagctctgttcttgtctgcagctgatttgtgcacaacagtttttgcacctatcaaggggaaagtttactcacctttaatttttcagtcaaaattgtgtggctcacgcctgtaatcccagcactttgggaggcctaggcaggtggcttacctgaggtcaggagttcgagaccagcctgcccaacatggccaaaccccatctctactaaaaatacaaaaaattatcagggtggatgtggtggtgggtgcctgtaatcccagctactcgggagtctgaggcaggagaagcacttgaactggggaggcagaagttgcagtgagctgaggttgcactccagcctgggcgacaagagcgaaactccgtctcaaagaaaaaaaaagaaaagcaagaaaaaagccgtgtaaactaaacgaattgaaatatctattgtgttggctgttggttctgctattaattggtggttctcttcaattaaggcataaacaaaattaatttttttcttgcaaactgatgtcgatggtctgctcctttgggctcatttcaacatcatctcattgacaatttaaagtgagttactcatttataaattactgatttatttgggacattgtttccataaacttttcataaagtgacaatgattttgccattctttcgcccaagctttaccataaatttgatgtttgttcttgcttcaattttggaagaattcatattgctttgatagggaatcatttcaaactcatgttttgtaattcttagtgcctctaattagatcctgttcagtcatattgtaacaaattggtacaagtttatttggtgcaaaattttttttgaaatctatacgtagattttgcaaaataaacattttccataaagcttctgacaaccccttatttatagcaagatctttatttagctagatatgtaaagctagaatatacattcatacaatgcaaacagcataatatatgtttaacaaatatttacgaataaatcaaaggaggagaaatctgaaaaggtcttatattttgtgcctagatttttctgaaaattcattttctaacaaatcatacggtgattttgatttggtggtgggaagagtggtgggtgggttggaggatgttgttaaattggagaaaatttagattcagagcaaaataaaaggtatctttaaaacattttttgttttttaaatttgtttgtattttctattttcatttttttctacatttaaataagaaagtttgtattatgcaaatcccaggaactgtattaagttgaattatcactatagaggtgaatggttccgtaaaatacagttagtggaaccttgttaaaaacaccctaatatcctaaaatgactttgaaatgtgatctgaaaaccctgtcattttccagtttgaaaatgtagaaatctaaaaccaattataatagagaaaaaaatttaagtgaatgtgattttgtgtgttgttaggagtcccttcactttcctgtgtacaattggctttcctatatgaaagcacttgcatttgatggcccgtttataaggaaaacctttgattgcaaccttttggaattcgttatgtttatttccagctggacatcaatttaactgaccattgtgtttggcttccagttatgaaatgaaggaatctctaggtttaaaaatcctaataattgtttctgaagcagctttaaccactggcagtccagcagatattcactgaggcactagtatttctcttgagttaaaagaaaaagaaaaagaaaaaagaatgaagaaaaaaaaggaaggaaggaaagaagagagctggagagagggaatgagggagggggaaaggagggagagagggagaaagggatatttagcagctctgtagatttctcttaaaaagaaacacttaaacaatgtactttcacacatttgtccagtgcagttactggcatataactgattcacaataatgatttttaattaaactcttggtcccagtgcaaaaaataaatatgcccagaaaataaaaatataaaagcctcaccaaaactttaataactttaataaacttttattatgttaattgacatataattgcacagatttatggggaccagtgtgatgttttgatacatgtatgcaatgtgtaatgatcaaatcaaggtaattagcaaatccaaaccttaaatacttattatctctttgtgttgagaacattcaaaattctctcttctgattgctaaaaaaatagaataaattgttaactacagtcaccttacaaatgctgtgaaacactagaacttattccttctatcttgctgtaattttgttttggttaaacaacgtctccttatccctgctcacttttcatcctttagtaaccactattctactctctacttctatgagattgacattttagcttccatatatgagtgagaacatgcagtgtttatctttctgaacctggcttatttcacttaacacagtgtcctacagattcatccacattgccactaatgatagaatgttactcttttttaatgactgaatattccattctatattataattatatataatggagtaatatgtatttataatatagttgtttatatatgtgtgtgtgtgtgtatatatatatgtgtgtgtgtgtgtatagccattatggaaagtaatataattatatatgtatatataaaatcacatctatatgtaaaactttttatttctttgttcagtcttgtaggttatatgtatccaggaatttacctatgtcctttaggttttctaatttgttattttacatatatatatatatatatatatatatatatatatatatatacacacacacacacacacacacacacacacacacacatatatatatatataaacattttccttttccattcacctgtagatgggcattgaggtcatttccatatcttggctgttgtaaatagtgcggccataaacattagaagccttgtcttcaggttcagaaattcttctttttgatttagtctcttattaaagctattgattgtaattttttttgttttttattatgttttttggctccaaggtttttgtttagttcttttaaaggtatctatctcattgttgaatttttctttcaaatcacgaattttttctttttcttttttttgagatggagtctcactctgtcacccaggctggagtatggtggcgcgatctcggctcactgcaacctctgcctaccgggttcaagcgattcttctgcctcagcctcccaggtagctatgactacaggcgcgtgccaccatacctggctgatttttgcatttttagtgaagacagggtttcaccatgttggccaggctggtctggaactcctgacctcaagtgacctgcccacttcagcctcccaaagtgctggaattacaggcatgagctaccgtgcctgacccaaatacccaaatcattttttttttttttgctctattttctatctgtattctcttgtatcctgtatagtttccttaagatcattcttttgaattatttttctggcatttcatgaattttctttggggtctgtcactagagaattattatgtgtctttgaagctgtcattttttttttttgcttgtttatgtttcttatgtccctatgttgatatctgcacatctggtggcaaacttgtccctttcagttttatggagtagcttttgtaggaaaagacttattcctgtagatgagctctagcatattggctgggtaagatgcactggttttggttctgggttgacacagtaatatagtttagttttcatgcaatttcttaggttatattttatgttaacaagatatttgcaagtgtctaagtggcctaggctgtggaagtttgtgatcatggtggtgtagctttgccagctggccctactgggcctactgggctgattctcaggccacagacatgtaaattctcatcagagtaaggtcactgagatatttcccttaccaggggtacagacatgcagacgtgtggcagggtatccaattcagaggaaaggccacattggatgcgtttgctaggctgtttctctggctgagaacataaggatgcagcagcttggcccctggggaatgaactgagtgctggaggtgggtcggcctgctaccctagcccaaggtgtgggcacatggtagcttggccagcttggaggaaagttgaacttataaatattgtgacatccaagatttatttttatttcaaaggattaaaattaatagttgtaacagtccactgtgaagtaaaaactacccaaatatttattgacaatagaatggatatataaattgttgtctaatcatacattagagtaatatccaacaatggcagtaaattatttgtaattgtatgcaacaacatggacgaatctcaaaacatcatgttgagtaaaagaagccagactcaagagtgtacatattgtataataccccttatagaataaacaaagttgtgcaaaattactctttgctattaaagggagaaatgctagtgacagaaagtgatcatgagacattttctttgatgctacttaagtatatgcatttgagtatatgcatacatattttaaagatggcatctaaagtggtctttctaaaacaaaaatataatcataaaaatctcatgcccaaaaagtttatactctaaaaggctcaccatttcaaacagataacatccgcctaatctttaacatggctaacccaatttttcatatcgacttctctgacttctcttggcttatctttcttttggattccttacccaaacctttatatattcatgtacacctcactaattatccacagttttcttattattcattaaattccccacttggtctccttcttacatgttctccccaatctggttagagatctctcctacttcctcccaaagcaccatgtgtttccttcagcttagcagttaccacattccttggtaagtactaatcaatttgtatgtttaccggactcagactgtgacgacaaggaccttatttatccccactgtaaagtcttgtgcctggaatacaaccgaatctgaatatctgttttctgtataactaattctatcatggatgagatttttataattattaatgtgatgtttcttcttttgctattttatttataaggctttttgtctttatgaatgtacaattgggacctctgtttgtgtgagaaaattaagatttattatataaagtattcatgaaaaatgctgcatgttagaatattaattcatcttctaacatgcagtatgtgagtatgtgtgtttatactgtatatgtattctttatgcagatatagaaagtaagctaatattgacttccctcttttttgtcattataaggttttataggaaaccaagtgttttctcaagaaaaactaagaatcaccttaaaaattagtttgagttacccaattgtatattagttatattattttactctgctacccatgaggcaaggttaaagacagaaggctagataagtgattcacaaaaataaagataatagaatatatatataatatatatatacatctccaagttgtactgtgagtttaaatatatgacccacttactaatcaatcaatggagaaaagctatgacatatttttaaggtgacatgttagaggtatttcatgaatatttgagatttgataagacacacatattaggtattagctaagtattcctaattattaatgtaaactagactagaatgtgcattagaaagagtagtagatatattgtcacaaaagctgagtgcgaaaagcaacaccagcaacttccagggtgatgccgaatatattattgcaggcttgagttccctcatctctaaaataaaagaattggaacagctgattcatatgttaggctaatattctatgctcttccctgaactgaaaagcctctttaaaagtttttttaatgtaatgatttagctataatactgcctttaaaaagggattgacagaggaagcatttgaatttcaatctggccttacatgcatttcttttgaaaagtcattagaaatgtctttagaaaggtactatgtgtttttaagggcaacatattagttattgtagtttttgagcacatttccataacacatgtgttgtggggtgttaccaccaccccaatcaaaacataaaatgtttccatcttctcataacctttcctctcactacatttggtcaatcctcttgtactctatcaccatggatgaattttatctattttagaacttcatataaattgattcatgtagtatgttctcttttgtctcatacttccctcattcaaaataatgtctttgagaattagtttgtgttatttgcctatcagttgcttgtatgttttttaatttttatttttcaacttagtagtcttccattgtatacatataccacaatttatttctccattcacttgttgataaacatttagtttttttttctgatatttggtaattataaataaaaatgctagaaaaattcttgaacaagtttttttgggagacacatgtttttattcttctaggataaacatctgagagtggaattgttgagtcatggacttaacacatttttaaaataaaattttaaagtaaaaataatttaaaaaagaaaagatctttcatgaatttagtagtttatttctgagtgtaatcgacttcattattttggccttttttttgatgggggggtggtggctggagacttgcctaacttatgggaatctggaattgcccttggcattgcatgtggcaacacaatggtacagaagcttttgtgaaagtttttgtttccatgaatgatgggaactgccaaaattgagaattatgcactctgagtgaactttcacatagcttaggttggcatcaccaagtgagaagcccaggacttaaaaaataaggtaaaacaagacaggaggtttttgttttgtttttcctagactatggctcaaggaccacctgaacggaaatcccctgggtagctgattaggcatactttttttttttttttttttcgagatggagtcttgctgtgtcacccaggttgagtgcaatggcatgatctcagttcactgtaacttctgcctcctgggttcaagcgattctcgtgcctcagcctcccgcgtagctgggattacaggcacccgccaccaagcccggctaatgtttgtatttttattttagtagagatagggttctgccatgctggccaggctggcctggaactcctgacctcaggtgatctgctcacctcggcctcccaaagtgctgggatcacaggcatgagctaccatgcccggcctagacgcactttttaacaagcatgtaagagactcttacacatagtgaaatgtaagaattgctagatcaatctaaaccagagatcctctgctgtggcggcacatttgcatcaccaagggagctttcaaaattgccatgcccttgacatgcctaagaccaattaagtcaggatctctaggcatgaccaccagatatcagtattatttaagtctccccaagtagttacaatgagtagccaaggatgagatcttctggtctattctatgtcatccttagcacatctgagagctccactgcctgcatgtctgatgttttgttgtacaactacgtcattctgacaatatttcaaagcattgaaagaacatttatttcctttgtacaaaatgccttgagcaagcaagattgtctcaggtgcatttgccgtaattgcttgccttggtcttattaccttgtgaaaaattatgtatctttaatctatgctttgggtggcaaaattaattaataattaactttgtacttacctaataaaataatgttgatgtaaagtcctctaagtagtcctctcacttactaattttatctatgtattggcatgaatatcttggttgaaccaaagaaataaaacctaaaatatatgcctcacaaaaatgtgctttatttaagtagattcaatgaatgagatatcagctctcctcaaatcattataatgtacctgtaagtaacgaactttcataatgtatttaatctataaaaatgattctatatgcagcttttcaggaatgcatgcatatatttcagaaagtaaaattccctttttttccaggggaagacttactaagatattccacttgaatgtatgaagtacttgataaagtgcatttctgctttacatggttggaattctactttagtgctaaccttgcatttttaaattttgctaatagagaccatataaaaattcacctgcaaagcaacttaaagaatgttcttatttattatttgtaaatgtggcatcctttacctatcatgcacaccctgcaacatctcccccaattaaatagattttgttcttcaatgaagtacaatagtttgatggattacatttaggaaaacacgtcagtcaatatgaaccaccgaatcccaaaatgctattcaaatacccttatgatctctttaacaaacaaaagccttcagacatcatgtaagaaccattgcatctttactttttaatgcaatacaattatttgtgcctacctaaaggtaaccagatacaggttgccttttgaagtttgcagtagcttcattttattctgaaccagaaagttagccacaccagagaacacttttttcccattgtcttcttcaaatgtggttttgattgcccattgacaaagccaagctagtgatcagtatattgtgattctcctaattaaaagcatgctaacacctagaatacagtagttgtcccttatccatgggggatatgttccaagatccccagtggatcctgaagccgtgggtactgaaccctatatataccctgtttttttttctatacatacacacctatgactaaatttaagtataaattggacacagtaacagattaacaacaatcactaataatagaaaaattatgacaatattttgtaatagaagttgtgtgaatgtggtctctctttctctcaaaatatcttactgtgatgtactcacctgttttcagaccatggttgactgtgggtaactaaaaccatggcaaccaaaaccagggataaaagggcactactgtaaaccattcccatagtcccacaactcccatgataaagacttcacactataaatgaaagaactgtttgattggcacagacccatctttgagagagcctggagagcctggccaccctccccccacaatatgtgccaatgtgccaatcatgtctctttggaatttcacaggccatagcctttgttatgtgcccttaaaacagcccctgtccatctaccatgctgttggctctctgccatcctttctagcactcttaaaacagactataattggcatttgcttggctgggagtcaatttattttattgctacctttcccagttgccttaaccgttggatgtcttgacagttggcaaatgtagactgtggttctgatatgtcacataaaatctgttggatgaatactttcctctaggaaaaagtgaaagtgaaatcccatcctggtccaccctctttccaaaacaataaacatttcctggcttccacaattcccctaatcatttaaagcagtacagttgttatggaatgggcagctgaacttaatgcgtgtctggaccatctgttctagtatttagtcttaaagaagattgcttaagtgactacagttcattgcaaagagggtgagttccatcagggaaagtgctagggtactatgtcatagaaaaacataatccagagactctggaaggactatttttcacttagcaatgcttaacatccatggaaaaaaataaattattttcctaggtacacaagtaatacacagacaaacttgtctccaaatttgtgatttgtgttacattatggacacaaatatgatatggttgtagaagagacacaaagagttttatcgctttattttcttgagacatatttttttaattatagaaacatcctaagttcaaaaagtcagacaaaggtcagacaatttacacataataaatggcatgaagtagataggcaagaaatactgagattatagaggtaagaatattttattaagtgaaattcctcacatagcttttaactatgacattcactatatttctgggccagagattttacaaataatgaagtacttttgttgtttcaacagactttaccacaaggttctggttttgtttaacgttagtgtaggacaaattaagactgtccagtatatgaaaccttcaaacttgagaatatataaacagtacagacattatggaccatagtactcactcaggaaactaattttttatgtgatctcacatcatccaagtgcatgactcagttcagtcaaatgcccagaatataaatggaagcaaggctagtagtaacagtgacagagcaagttgttataagaagaacttccaattatgaagcatccaaaaatggaaatttctgcctcttcaagcaggaagtaaatcaaatttgaaaatattagggaaaaaaagcctgggagtcttcaaatgagatacatactttggatgagggatttgccaagatggccattgtgattctagagcgttaaacaaattgtaccttaaaattgtataatgtagacagtcgtgtgtgggccaagtaacttaatgaaagacaaatagagtttcctttttctttgtgtcattgagaaaaatatatatattttaaatttacttctaggaatatttactaattgaaaataattcataaatggagtcaaatagagttgacaatgaatgaataaccaagagtagatggaaagagattagtaaagataagcaattgtggaataatcttatagtacttttgagtgctttttattttgtgaattaaattatgtgaaatgataaatgatttatagcataatcgaaagaagaatgacaccacagcgaaggcccatattgagcagcaagtcaactgctagggctacgcgaggcaaagttggttggcaaccaggttcctcaatagctgtcatgctccagaaaagagccacttctacagcaggttccagaaaaaataaaggggatagattaacgtaaacattcaaataaagaaaaaaaaagacaacacgtaaggcgcaaacgttccctgctagtttctactgacattttttattaacattccttcagtttgttggaggagacagtgatttaccttaaaaatatttcctagcctcacttgaggttgcaggtgaccgtgcgattaggctttagccaatgaaatatgaatgagtgtcccatgaatgagggcttccagaaagctccatgagagtagatttgtgtgaaaagttcattttgctcctctcttttggaataaggaggccaatttgaaagcacaagaaacagtgaaagaagagctacaaggagcctgagttttcaatcaccatgtgcttgcgtgctagctttgggttgtctacttctaaacttaatttatgtgagagaaaaataaacttctaatctatttaagccattgtgttttagttttctatttttatcagttctaagcagtgtcgaattgataagagcacagacctgttatgacatctatggcatagtttatttttctgtttgtgaagaccgtcacttatataaggagaaaacatctctttataatccagtttaccatgtatgatagatttaataataatttatggaaaatgtaagaagaaagtaattttaagacatcaggggaattaaagagaagaatgctttgaacattttactttgtctgattgtaattgaactgaaatgtatttcctatatcttgaaaaaccctctcagttttaaatgtggtcatctcagtttcttatacagtaaatctctgcccccaaaacatttatccaggattttgagaatctgtcccttgtctgtaggacgttaccgtagagagtcctcttcaattcttggttcactctttcactgttcctttttaatccatctaattcattcatcctcaaaaaagcgcttaagcatactgtgtaacatactcagaattatgctaagtactatgaaggaagccacaaaacacaaaacagcatgcgtattcagcttgatgatgtcatgtatctcttctttgaagcttgggtagtactttataacatcaagtaggaaatatttttttaaaattttattattattatactttaagttttatggtacatgtgcacaacgtgcaggtttgttacatatgtatacgtgtgccatgttggtgtgctgcacccattaactcgtcgtttagcattaggtatatctcctaatgctatccctcccctctccccccaccccacaacagtccctggtgtgtgatgttccccttcctgtgtccaagtgttctcattgttcaattcccacctatgagtgagaatatgcggtgtttggttttttgtccttgcgatagtttgctgagaatgatgtaggcaataattttaacaatttgaatagctcagtagctcagtctttacttttttttttttttttgagacagagttttgctcttgtcgcctaggttggagtgcagtggcgctatctcagcaaactgcaacctgtgcctcccgggttcaagtgattctcctgcctcagcctcccaagtagctgggaatacaggtgcctgccaccgtgtccggctaattttttgtatttttagtagagacagggtttcatcatgttggccaggctggtcttgaactcctgacctcaggtgatccacccaccttggaaattagaaatgactcatggaaaattctttattttgtgtccaaggaatcaactgctgaaatacagattaggtgaagattgaattgagaagagttcaattgacccatgtaaaaaatctgcacatgtaccccgaacctaaaataaaagtagaaaaaaaagaaaaataatcccccccagagaatactaaaagcccaaagtagagattttatttgacaatcagcattatacataaaagactgattcaacagctaagcaagagcagtggggagcatgtgataagaacgactcacatttattgaccctttagtaatggcttggcatatgctggtttacctatatgtattgcccatttaataatagacaataataatgtcactgcatcctgtgcttgtcaatcaatgtccagagagtaatatgcaatggtaggtgacagttttaagaaggctgagcaacctatatctagagaagaaggactgcaatgggaaagattaggcatcatggcatttgagatcaggaaagaaaatgagtgagttcggaatattcacaatcagtgggcccagatcataacccaattctatttaatctaatacaagctgctgatctttaagtagctacagactccatcaacttcaaatatctttgagacttgtaaatcttccttgtcattgtattttggaaagtgttgccctgacactggcccaagtaaccacagttattttctaaaaatggcaagcatagttctccataaggagttccaggcaaaatatatgacctagacttttcaaatataccaaagaagattcccttagactttctgacttccagtatgggacattgaatggttaagcaaaacaatcttgtattaattttcttgattcattagaaaagcagccttgtgtttaatatatttacaggggcatagattaggaccatttgttttggttccacctgttaacgttgatcaattatctgttttagcacccaactacataaaagatttacactttctttccattggaaaacattctttgaaatccacacattcattttaggatcttctgtaaagactctttttgtgctatttatagaaacataagtccaaagcactggatgtttcaagcatgaaataacaataatagaaaaatattctaatccagtcattaacacctttaggtgttcagtcagttagattagcatttcattcatataggctgtttttagagtctcaaaattaatctatgagtaataataatatcctaaagacaaacatatatagattgactttcaagtttttggcaagagaagacctcagaataattttaatcaagaatatttcagtccatacccttttagtttcagttatgaacaaaagaatgcatatactatgcatatattttatcaatatgtaatcaattcaacaatgcaacaattattgtactaaagtactgttggaatataatatgatactttcccacaaggaggtcccaacatagccaaagttgatgagtaagtaggggattgagttaagaagtattactttggcaaaaaccaaagcatacagactaatggatacctatgaaactagattctttttgtcttctaaatggctctaaaggcaaatccaaaaaggaattcccaaaattgtttgtgagttgagcattattgtataagcagaaacgttttgtattaaaagcattttgtatatgcagaaatatacaaaaagcatattgtataagcagaaacattttgtattaaaagcattattgtataaacagaaacgtttaggaggtttcaacttaagatgctgttacgctatgtatctaagagaaagtcatttctgttttctcattctcatttttctcatttaaaaaataaagaagtaagaatacatcatctggctgggcaaggtggctcacgcctataatcctggcaccttgggaggctgaggtgggtggatcacctgaggtcaggagttcgagaccagcctggccaacatggtgaaaccctgtctctactaagtgtacaaaaattagctggtcatggtggcccatgcctgtaatcccagctaccccggaggctgaggcagcagaatcacttgaacctgggaggcagagtctgcagtgagccgagatagcgccactgcactccagcctgggcaacagagcgagattccgtctcaaaaaaaaaaaaaagaaaagaaaaaagatctgattaacatacttttgaactgtcttcagctaacctaaatcatttggagatgtgttttatgtgttagaaaaaaaaatcctcaatgataaagactaataaagtatctttaaatataaatatgttactttttatgttggaatagttattctacatcagggagtgtgtgtatgctaatgtgagccctatcaaaggatgacaataattcagttctttcatttcgactccaactttccactaggaaatacacccatgttcatgagtcagaagaagaagaattttaaaactatgcatatcttactgtggagatccagttcattaaagtaaagaacaggtaaagagctgaaaatggaatggaaagaaagcaaaaaagtatctgtgttttctacttaatttatccactgttaagcccatcattttaatctatgttctagtaagaagctatataaacagtctgagaaacaaaccaacccaataaaattgatcagttcagtcccacacagatattttcagaaatctttgattattctaccttaaagcactttgtctacttaaatggtacacaacagtaaatgatacacaagagggagttgatatatattattagttacactttatagaagaaatattattttccagggcagcaacccagactctgcagtaaacaccataaatcaaagacaccataatgctgatcagaagctgtccttaagccctgttgacaaggctgagtactatagagtggattaacttcttccaccattgcttgttttagctgtccccactccatgttcagatagacactctcagttcaaacaggagtgagcaaaaatatattgtagattcaaccggtggaaaaataactttacagcagagtttcattttcagtaggaccatttttttctgggacctctctgtgcacacaattaaatgaatgctccttgattaaatataaaacttctgggaaatggtcgtttaaatggcataattttatgtaacagatattttaaagacaagtaggacatttagttcatgataaaatagggacactcgattaaaccatcaaattataagattttactatgtaacattatctggataattctttttttttttttttaagacagagtcttgctctttcgcccaggctggaatgcagtggcatgatcttggctcactgtaacctccacctctcgggttcgagggattctctggcctcagcctcatgaatagctggaatcacaggtgccttccactgtgcccagctagtttttgtatttttagtagagacggggtttcagcgtaatggccaggctggtctcaaactcctgacttcaggtgatcagcctgcctcagcctcccaaagtgctgggattacaagcgtgagctgctatgcccagcctggtaattcttatatgaaacacaggaactatccatttcatataggccagactagtttttcccatttaaaatgagtatgtgctttctgaatttttcatctgcactttggtattattttaacttgtaaattagtttttgaagcactaccattcctatcccatgacttggagttaaaccacatgtgccctttttggctaataatttacacagctaacatttcaggttgaatttacgtgagtaaaagtaaaacagcatttttccattcttttcaaattcattccgataataaaatatttaaattctggtaaatgacgtaatgggaaaaacaatgttttctgaaattgtaatggtagaccttagtgctgataacaaatgtgtccaaatatttcacaccatttcagatagacatgtgcatttatttggaaggctgagctgttattaaaaacccatctattgtcatccatgtctcagaagagaatgccaatggcaatttttcccatattttgaaaaaactgaagatgtatcacttttaatgtcctacccaattgcttagaaaggaagacatctcttattttttccatattaaagctcttctcatggggacaattaaatgtgcataaattcctcagagtttttattgcttttgttcaatctgtagtctcaatcagaaatctccttcacctttgaaatacctaatgggtcctgtcactcttgaggtttactgtagaaattataatctgtgcactatttatagcgtgtatctttttcaactatatagacatgtctctgtctccaaaagaaaatgcaaagaataataccatcttccaaataattttttaaccccaaatgttttatgcaatctatcatgtgctgagtatggtcttctaggtcaaaataatacattgctggtaagataatctatgacaaatattataaaattaatttgaacaaaacagtctaattcagagcatgatagctggcaaatacaataactctgtaagctatgatgttcccagtgtctcatttttcccttacatcacacattttgtattcaatagacaaattaaaaaagaaattggcaggtatgagtacatggcagtgaataggaaggaagatatttagacctctgtgtctggcatctattttaagtctgatgtgataccatttttttgcttaggcaaatctcgaagagtatgacttcatgaagaattttttttttttcagttcagacctgcaaaaatctaacttcataaaacaaatgtaagtttacttttagcgctatgccagtggtttcttagatttaggatacataagataatatatttgtcttagacagatttcacaaacatatttaacttcttgatttcagaactttgctgtgaaatagtatcctgcaactatctggcatactaggatgatttccaattcaatttaatcaatattaaatgggaacttaatgggcagctcactagtgataatgtattctcatactcagaatttacatcttacatataattataaattataattcttaaccatttttgagaatgaagaattatgtccttctctttattaccacctcttgcttcctagtctccttccttggcccacactaatctcacttaatgaggcttaactatttcttcagtgttgtatagtatttatcggtcattctcattataggtaatcttattggctaaagtctagatagatgattatgatttacttttctttcaaaattaaaggtatcctaaatctgattgcagtttgccttaactttgttttcttagtaaaaattagatttgccaagatagtactaggtatatttgaagctaaaactcagaaaaaaactgattcctatggttacttttgccagagagctgtagtgatttgtctaatatttcaaaatgattatagaagcagttctaaagattatatttgctaagtcttggaaacatgcacatttttcttacacattgatccagtacctagtagtttggttctttcccatcattagcttataataccgacaaaataaaattgtgaccaatgcacatttgctttctcacaatgtttctggtatttttagagaagttaataactaccattatcaccaaagtgcagttgacttcaattatgtgacaatgtatttatcaaaatagtgactcctcctgtgagaatgaactacatgaattcttgagtttgaaaaataatatactgagtttcctggtcaaatagaattactcaaagtaaaatatggatgagaatttaaaagtgcatatttttaacaaacaaatgcatgagctatgtggtttcattccaagtgtttcagtagtcaaataaacagagagagttgttcaaacataaacttatttgttttgaattttctttcaattcaaagtaaagcaatttaaagcaagcataattacatatgaaaaatcctaccaaaaaggtagcataggcaataatttgaattgcatatttccagttgcctaagttttctatgtgaaaagtataaagaaagttgaatagtttatgcagaaaagataaagccatgagtcccttcattcatttactgattcagtcaatgttaagaaagtatttatgtgtaagacactgttttcagcacacaaaaacatgcaaatacacataaaatatgaccccatgcaatggtggagactgcacctgggaacaattagaaaaaaagacactaaatctagcctaggtatgaggaatcaatcagttcaggaaccccttcgaacctaaggtgaatattgagtgcatcgtagtagactgtacctggagctgaccagcctcatgtcaaggggaagcaagaacacggaggacagcacaagaaattgcactaggtaaggaaaatgctttcagggaagtgtaagaagttctgtgttgctaaagcttaaaatatcagcaaagattggctaggagactgggaagttagctgggagggccttacttacaaagatgctagaaaatacagttctttatgggaaattttaaagcaaaaagaagttgtagatatatagaaaaaaaggataatgcactgcttctgaatttctgagtggagatagtatagatttgagttaaacagagtgacaagtcattccagaatttttttaggtaaccaataggaaatcgttcacaagtttaagatataagtgctgccacatatattgttacatctttttattaattactaattgaagtccctgtttggcagaaagtatagactttcctccttgaagttccccctatggttacaagaattgaacaatagtgtgtatatatgtatgcatgcatctctatctatctatctgtctgtctatctatctatctatctatctatctatctatctatctatctatctatctctacctgtctatttctttccctccctatttatctctttttctctctatcacatcatatgtccagcaacaccaatggtttttctgtctaaaaacaatcatttctaattctaaatgtggaatgaaagccaaaagacagatatctgcaaaatccaacctgtttattagcgcttttgcttcagttgatacactcagggctgcccttaaggatctataccctggaaagagcagtaaacagcactgatgctcttgcagcgtcccaaaatgagagatcttttggttcatgctccaatggccatcctttttttctaagcattctcccaaccaggagggagggattcagaggagctacaacctgtgcagaaaccagccatgtactatggctttcaaacacagccatatgctatgcagacaccagccacctatgcttcgacctttgtgtagatcttgtagaaccagctctgaatccctccctccttgtgagaccttcattaagtaccttggtatcattttttttcttttttctaccagcagctaagttgaggctatccctctagattctcctaactaaaaatacttaggaagtcaaaattggaatctcagtgacatcacttccgggaggtcctaagatcctcatgctcacctatttgtctccgggtcaatgaatactaaaggacatcctaattttcaaatgtctattttacacttctctcagtgtattcgttgcttggttgtgaaaatacacagaaagcataagaattctaaaaagctactgactttggctcaaacttgatcaccataaccactactaacaattacaataatgaatataattttactgttagtagtgtgaagaagacacaaattcagatacaaacaatttaaaggagaaaagagattacatcttcaaaacttcttcacattttgcacataacatcatctaatcacaggagtgacatcaacatatccaactcaaaaaaaaggagttacacaggatattatacattaacattacagggtgagtctattagaggctctcttagaattctgcgtactgcaatatctacatcattatagcttcatatctatctatctgtctatctatgttttaagtattaccagttgattttattctagaagaaaataggtaatatgcagctacttccacctctcccctttctctcccattctaattgctgtaattacttttaattcatcatagtttatcatttttcactttattcttgaggtaaaatgatgcagttgtttaatcttctatattcaaatgaaattagtgcttactgtcagcatttttatcatttattctctgcttttaacttctttgtcttgatctcttggttggctggatataaacatcaagaagtttatgtattttaaatatatattaaatttggaagagctaatatttcattttgccttcttaactggataacattttgcttggttagaatgtattcttggtcagatttggttctcttctgaattttatagacagtaatctaatttctctggcactgaaagttgcaggggagtccaaagctagcaagatatttatccctcgtgggtgacttgctctatttttactgatacttaaactagtctttctttatcattgatgttcaaaaacttaaccagaatatgctttagtgccaattattttatgttttttctttttctaacacagaagaaaatgtgtgaattcattttctccttggttccagaaacaattgcctgtattatattcagaatagttctgccacatttgttggatactttatattaaggatgccaaggattcttagaccatactgtttttatcttccgaagctatcatctctgtagttgtgagaatcactatttttttctttattgccattatctcagttttcaacatcatgacattaatgaaggttttggctatcttattctggtttctatatgttattaatgtatttattatattttaataattgctggttttttcaaatattttatggtttatgaaataatttttaaaatagtgttttggaatgtgttttattgaattttcattaagttttttaatcatttaaagtattcatagggaaactatttctctaccatgtaccaggggttacattttcttcaagattttggtcatttttaaacagaatttttatgtgtatgtgttgtatgtcttgtgtttatttattcatgtgtgtgtatgatgtttgcatgtgtatcagaactttcctttttatatagttgttgacattgaacaagattctctttgctgaacatccttgtttctgccctggtacacccaaactttagttggtctttcccactctggacttgcatcttgcactttactagcatcttgggagttgatttcttacctccattcttttctctgaggaaatagcagtgggtgtagccagagagcctcagaaaccactttcagttcttgctaatggacatttattcttgtctttcttctggggtctgaacatcctgtgccagtgcccattccaagcagtgaagagtgcattccgtccacttccaccacgggtttattctcccctggcagcacagccaacctctggggtggtcttgttatagaagtgggtgggtctactttgatgattcttcttggttttccacacggtgcctatctgcctgatatggtttggctgtgtccccacccaaatctcatcttgaattgtactcccataattcccacatgttgtgggagggacccggtgggagataatttgattcatgggggcggtttctcccatactgttctcgtggtagtgaataagtctcgtgagatctgacggttttatctggggtttccgcttttgcatcttcctcattttctcttgctgtcaccatgtaagaagtgttttttgcctcctgccatgattctgaggcctcctcagccatgtggaactgtaagtccaattaaacctctttttcttcccagtctcaggtatgtcgttataagcagcgtgaaaacgaactaatatacaacccctttccatcccttatgtattctccttccccagaactaaaactctaaataaaaattttaatatttttctctttcctggactgtttctggagtttttaaagctattataaaaagtaccagccttttttttttcttttttcaacccctgttttttacaagattgtggttagttgctcacttttctgcaggtgtgttggtgttccttcttccttcctatcttttactacctttgattcgtttcactgggttttggagcctgctatactccaccctcttcaatggtcagtttccatggtgagagacagaactagctggatttcctaggccgactaagaattcttaaccttagctgggaaatgtgaccgcacctacctttaaacacggggcttgtaactcagctcacacctgaccaatcaggtagtaaagagggctcactaaaatacaaattagactaaaagcaggaggtaaagaaatagtcaaatcatataccgcctgagtgcacagggggaaggacaatgattgggatataaactcaggcattccagcagggagtggcaaccccctttgggtcccctcccttgtaggggagctctgttttcactctattaaatctttcaactgcacattcttctggtccgtgtttgttacggctcgggctgagctttccctcgccgttcaccactgctgttcgccgccatcccagacccactgttgacttccacacccccggatccggcagggtgtccgctgtgctcctgatccagtgaggcgcccactgccgctcccgttcgggctagaggctcaccattgttcatgtgcggctaagtgtccgggttcgtcctaatccagctgaacaggagttgctgggttccacagttctcgtccatgacccacggcttctaatagagctataacactcacctcatggcccaacgttccattccttggaatccatgaggccaagacccccagttcagagaataaaaggcttgctgccatcttgggagccgcctgccccatcttgggagctctaagaacaaagacccgcctataacaatggtatgctcttcattttcaaagtgctccaacaactcttgctgaggtacaggtgagttggcgaatctttcaaatcactttcttgctaaccagccaaggactctcatttagggccctatggcctgttgatttgtgcttattatatttttgaagtttttaatatttcttaccatcttatccacacctcttcctgcactacactgaactcccataatataagctcgattaaggcaacaagtaagtgtagttctgttcacttagcagagcttaccacagaataggcacccaataagcatatgctaaaggaatgaatgaataaatgcatcccttgtgaatcattatcatccaaagtacatatggtattatgttataaaaataaattaaagaataatagttttttgttaattggcttatgtaagaaaggttataaattgtcttgcattttcttatactaaatggaatgtgaagttactactaagagtgtctttccagaatttgaataagcagttgtgatactaatccacattatctcttcaagacacctgacagtaattacctccgtgataaatttgaagaaagaaaattgctttgttatcttgagtttaagaaactgataaagaattaaatgaatttaaatggaggatggattttctaacaccctgacactttgaccactgaagtgctcataccatgtgagggatctgtggcctgaaagcaagaaagcttttattagtgatcctttaaacaatataaggtttttaaccctatccctttctacctaatgacatttttactaccacaaatgagaggggccgaattgctcagctcatgtttgatgacatttatatttacttaaatttatttatatatttatttaataggtgtgtcaagcacctattagtataagaaaatgtgctaaaacaccaataattttaaaagatgggcaatgcatagccctttctctcaaaatatgtggcttaaaagaaggcatcaattttaagtaattcaaggtagaacaaaataaacaccataagagagttcaaagagggagggtgattctaaggacgaaacagtcacattagggaagcactgtggtttagtaaaaaacatactcagactttggaatcagagaggcctgattctcctgtttatgacataaacatatgtggccttggtaagtctcagttttcccatgtataacatgagagcacctatatgagcctgttgacaggggtttttcagccaacatagtcttgtactttattcttttgactccaaaaatggtaaagagaaagaagatctatctaacatatcattggtccacattctctcagagtgatcattctaaatccaaagctgaaaatgccattgttttcctttgatacctttcatagttacacatcttcttctgctaaagctcaaataatttaagataatgaacaaatctctccatcatccagtacttgagtgcctcttgaatcatgtctacagccactctttgttatgtcctccggataaaagatgtactagcctgtttgcagttcttcagacacatcatgagccttccatgcttgcatatgttatgccttctgttgaaaaagctaccccaatttagcaaccagcaaatgttgtatcctccatagattagtttagaacttttttgttaaattctgagcttttctcttcccccatcaaagcatccactcctcactcctatctatatcactcccattagcatatacatactttcattttagcatgtatattgtcatttattacatttattaatttagtatctgtcttttttctagattcataatacgtatgtgctagcaatatatttattgatatgttctttgtcccatgagactgtaagatttaacaagtaaggttttatttctagcttaactttaaatttccaaagagcctaatttctttttgaaaaaagaaagaaacaatcaatcaaccaatcagttaatccatgtagcaaataggtaacatattgaatatgcttctgctcatctagaatagacagtgtacctccaaatacaatcatgagcctaaagaggggtgaatggatactatggtttggctgtgtccccacccaaatctcatcttgaattgtagttcccacaatttccacgtgtcatgggagagtcccagtgggaggtaattgaatcatgagagcaggtctttcccatgcttttgttgtgatagtaaataagtctcatgagatctgatggttttataaagaggagttcctctgcacatgctttctctcttgtctgccgccatgtaagatgtttcttgctcttctaacatgcttatgaggcctccccagccatgtggaactgtgagccaattaaacctctttcctttataagttacccagtcttgagtatgtctttattagcagtgtgagtacagactaacacaatggacaaatatttcatagtgacccactgaccattgatatcatttggatctgtgtccccactcaaatatcatgttcagttgtaatcctcaatgttggagctggggcctaatagtaggtgattggatcatgggggtggattgttcatgaatgaatggtttagcaccatccctttggtgctgttttcgtaatagagttctcatgagatctggttgctttaaagtgtgtggcatctttcccttctctctgttcctcctgctccagccatgtaagatgtgcctgcttccctttgccttccaccatgattggaagcttcctgagacctccccagaaacagaggccactatacttcctgtacaccctgcagaattatgacctaattaaaactcttttctttataaattttttggtcccaggtatttatttatagcaatgcaaaaactgactaacaaccatcatcttgagtttccagacttgtgcttgtaaggatgcctctcagctggtgtacataaagagctatcaagaactctacctcaagagtcaccttgcaatagacagaaatatttttccttaatgtcaaaattattctttactgccatccaatacaatcacctcaccagcaacaacaaaatgtgtttgcacatctatgtgttttaggatagaagacataggaaaagcacaatttgagatgaagttgcagagtcagtattagaactatattccaggaatagagtcagtaaattctttaatgtgcttctatactgagaattatttctcttccttctattgactgtaataaaagaataataagtctggaagcacaagagcaaggataccaacacatataagattaactgttggtaccattagaggccccagcacagattaatgcctgggtgttataacacaatcagcggtagagaggaagtttttcaaatcaaagcactccatttgttttcataaacactgattcactttaaaaattgatcagaaaacagattggtcatgaatgtcatttaagattcagaggaaaacacagtaccaaaaaccaagcaaagagaagagccaataaaccttattacatttagatgtcctttctaaatcttttcctccctctctcccttgcccctggttcctttttctctctctctcccaactagttatggtgagaattcagcattgccatgatgccattctaaataaacattgacataagaatgagtcttgttgccaatactctaatgatcaacacaagaaaccaccgattaaatcggtagatacacaggtgttaatccccagagccaagtccaactctgcatgttcaccaacattgagataagtgtgtttcttgagatattactgctcaaatgaatttagcaagtgccaatagaacgtttttttccattctaacaaaactttattaacatagtaggtcttgaaaaatttaatatgcaggttttctctatatgaaggaaataacagaaacattagatattgcaatatttcctaattttcacgtaccaattatttcattttagataacttttgtaacactgtataatattcattttgtcaacataaggtgttgaagtgtcaaaagtattaagacacaaaagtttctcaaatatttctcccacatgtaaagtttctggttctgaaatcaaatatatttcagaagtgtggggttttaatcctatgcttttctggcacatattttgcttcttgtttccaagtttacataaaacgattattaggaactataattctgaactatattgttcacttatgaaatgtattgattattcttgcttatgcatactgaaacatccatttaattgttcaaaaactgtgaaagatattttaaaatgtttatttctatttgaattatagaagcaaaaaatatttgtcattaaaagttatttaagaaaacttttatttaggactcatcctaatgaaatccatttaaaatggcagttatttaaaaatagataccttagttcaggtaaaaagatttttcttctcatttcaaaatgctatagatggcaatgagtcaaaaagagtcaagataacaaactgttctttgcggcattagagaagaagaaactccccttcatgatattaagaaagtcattaagttaattaatattcagtacataaaaggactgaacagatttaaatgcattttgtggcctcatgattttaccaacacttagtcaaaaatatgcaacacagtgaatttgaaaagtccccccttcctcctcctattttttctttttcctttttttaaatctcttttatttttcacaaaagaataatgataattaataatattatgagtatcagtaattgagcctttattttttaccgcacactctgctaggcttctcactggtatcgatgcttctcctaccaatgcttcaagtcaggtcactgtgctggatttcttttctttttccctctagatctactacttttttttttaattcccctctgggcatcacctggctgacccctaaggtctacaacatcccttgctctttgggttccagttggtctcacagtgggaagctctgttgagagtacagagagcaagaggtgagtgagaaaatggccattgatttcttctctctctctctcttttctttgttccctgtgtgggctgtgttcctctactgagagcactagctcccattaggtgggaatctccctacacccaccttctccaaggcagtgacaatgcttaacacttaccccaaactctttaacagctttatattctttcattggtcctgggcctcattcctcctgtcttctctcagcatctttgccttcctaaattcatcctgtgctgtggtttctttctccaaacttctttagtggatcttagtgatacagacagttatcacaaatatctcctttcttattttgaaatgtgtagcatatatcctgtctgccacttgaaaccaaagcaacagccctttttttttacatttaacatatttaatgcagattgaaatctgcacaagggatcatgtaaccttcttcagctatctacttttagatctcaaaacttctgatttgacacttacatcctcatctccccttcaccatgcactcttagagattaacctgtgtattcagctaaaagtgattaaagtgattaaagtaggttcttgtatttcaccgcaaggttattgaataaattttgttttacatataaattatattttaggtatttattaccaggatcaaattttgttttgggaaagtttgatgtctgtgttttaatctcatgccaaaagcaaataaaatatcgtggaaattattttgatattacttttactgttaattgcaaatggaaatcaaagacaattggaaaaaaatttggctataaatatatattcctatatcaagaatttaaaatataaacttataagccagccctaccattttcaccttcataagcttttctttttgtctatttttgatctatttaattagagttttggagggaagagcagttggaagccttgaaacttgaaactttctttttctagaaaaaacactgatttatataatcttaaaaattcactcccagctcctcgggaagctgaggcaggagaatggcgtgagcctgggaggcggagcttgcagtgagctgagatcgcgccactgcactccagcctgggtgacagagcaagactctgtctcaaaaaaaaaaaaaaaaaaaaaaaaaaaaattcccagttcatcactggccatcaggtagaagggagtgtggtggagataatttaaatgtaaaagtttaggtgacttgattttgtgatgattaatcctagaaggcttacttggctttcttatagcctttgacttttagaaaaacatatagtaacattgatgcaggatttttcttggaccctttgccagactcacagtagggttgccctctctactcggaccccggcactcaaccccttgcaggagggagcatgtgagtgagctggtgtggaattcagcaggccactccagcacctacacagcaacgagctccatgcagggcctgtggccagcccaggtatgtcacctcaaggggaatgtggtggcacctagctgacggtgcctgcaaccctgaagccccagagggggtgttacagtgttcctttagttccactgtttgcagatggtggtgtgttagcagcttaattggccccttgcttcattgtgtggggcagctcccctctgttggcaagggcaaaaggctggtgtgacagcctttctgggtacccgcactcggtgggtcccaagctcttgtctggtgtccaagaagaatgaggtcacacagacggttgaaggatggtgaaggtggaaaattttattgagcaatgaaaatggccctcagtggagaggggagctggagaggggatgggaagggcaggtcatcttccctgaagtcaggttgtctcttccctgaactcaggtcatcttctcctctactgactgagtccagggtctttataggcacaggaaggggagtgcatgctgattggtttgtgagtatgcaaaaaaggttcaaataaaaagtatcactcaaaggtgggcacaacagtgtagaaaaccaattaggaaagggaaggtatatgtaaaataggcgaagggtgggcatcaatcaggggaaaacatgccaagcaggaagacaagttctcagtccattctgaagatttaacttgtattttggctttcaggctttaaactatcttcagcttggtggtggggtttcactgggtacccacccctatctacctaggcatttggctgcctcctgtcactatcaatatcttattgatactaaatattattttcacatgtagttcttagataaaatgtatgtaaaatagtgtgcttgaacctgttgtgttagcaacatgctaggagcaagtttagccttacaagctttacaaaaataagtttgttcgttggatttaatatagcacagaactgtatttgaaagcagtagtcagaaaggaacacaacccagggagaagtctggctcttatcacaaaatatgcatttcttgaaccaatccatcatccaaaaatggaaagtagagacaataataaacaagaaggcttgatggccatttccaagttcaagtttctattacttgattgcaattgagtgggcattactgtttctccagattattaagcaagaacaaaattattatattattatttctgaatttttgagtggtgactggataaacaagaggcattaggaaatagagttgcttttctttttttaatttacatttatgctggtagtagataacataatttgttggtatattgttatttattttaaataaccatattcatattcagaaagcatgtgaggagtaccttgtattgaacatttattaaaagcagaatgttgtcaaaatttaggggatttaattgtaccatcaaattgtactcccaaataaatattacagtacaaaataaacccatggataatgaaagtaaatacagcaaaaggggtaagaatgaatgggtaaatttcatggaattttaggaatccatgaatacataggcacttattaattgttatttgtataacaaattcttaatgaaagtgctttaacaacaatattttaaaagactgcatttgttttactgtgtaccaaattacttccagttttagtggcctgaaattacagttatttattatttcacagcttctatagatatggctttgttgggtatctctagctccgagtctctcataaagttgcaatgagattgccagccaaggctgcagtcatctcaatgcttgaccagagaaggatcaacttgcaagctcactcccatgggccaccacacagagcatacaacatgacagatggcttcctcagctagagggtcttaagaggcagcaaatgagaggaagtgacaagacagaagccacagtcattttataacctacacttggacatgacatcccatcacttttgtagcattctattcatattctatttattagaaatgagttaccaggtagagtgaggtgaagtgattaaacaaggcacagataccagaaggcagagatcactggggatcatcttacaggcttcctgccagaaaaagattaacacaaaatgatgcactgtgtgaaattactatactagtcttggaacactaaattttgataatggagattcaatcaagcaacacttttaaagcattaaatggctaatcataatcattctaaactcagaatctttacgttatttagacattaaagtccaggttaaaaaaagaaaacaacaaaaggacattattgagcattattgagttaaattgctcacgcccccacagtcactctgtggaccaagaactatggctgggcttattttaggatgggaactgaagagtaagagtgtaagttttcagataaaataggacccttaaacaattatgctcccacactggtttaactggatcttaacaagtttaactggatcttgtgtgttagcgcgtaggtgtttataagcataatagtgctccccaagggaaaggtaaatttgccatcacttccctaccaaaatggcctggtactttcttacctgccctaaagtcatgcttcttttcaaactttgaattatggaatgccagaggccacaaagcacaacttatttctttcaaattgtaaatctaaacctcctaggaaaaaaaaatgggcattaatttcattcgtgaacatatcccataatgagtctataacccagttattttgtccttccaactttattatgatgttattctattttgttttgcactaatgtcaagaagcattttattaaatcaaagccaagatttctagttttcttttaaatttttatggggtgcatgccatactttgatacagatatacaatgcatacgaatcacaccagggtaagtatggtaaggaattctagttgtaatattaagcccaaattatttctgcctcaataagagtgacaattagataatttctcatttttttcaaaaaactgaaaatcctatagacatgtctttcctttttgaaaagaaaaaaataggggtagtcatcttatattgattatattgtaatattctgatttgtttttcagagcaataaggttatatttgatgaagagttttcactgtttttttttaaaagaaatggtggatgcttttgtgacttaattatttttcagatgttcatgttccatttagctaagacataacatgatcatgctcagaactcctgctgttttggcaggaagtggaataaaaaacaaagttttactaacttaaaacagtttctcttggcctttctgttgacttattttatttcttgaattattttattttgttgacatcttgaaaaggagtgattctgaattaactgaatttaaaaagatatattcattcatttttaccttgtgaaaccttccctgtatggatgaaaggtagaagagaagacaaaaaaatagtacattcagagactgactagttatcttatgtgaaacgtaaaatcaaatcttgttaaacaccttgcttggtcttccaatggccttcctttacatttagaattaaattcagtgccttcatcatccatccggttctatgtgtcctaatctatgtcttctgttccaacattgtgctttgctattgtggctcaagccactcaggtctgtgtttttttttcttccaacccatgaatctcattctaccgcttaggacttttatgctcactgctcccctgtctagaaaactatgactcattctttctcctcattcagtctctaattagaacagctttccactgtgacctaatctatggtctaaatctccactaaccacagtagctgggattacagatgtgcaccaccatacctggctaatttttgtacttttagtacagacagggtttcaccatatcaaccaggttggtcttgaactcctggcctcatgtgatctgcctgccttgacctcccaaagtgctggtattataggtgtgagccaccatgccaggaccaagctatgttttcttgaccttctttcttttcccttccatgcccatatggaaagtaaacaaataatccactgcttcaatatggttttgctttgtttctattgaattacactctgttgtttttatagaacatatcactatttggaaattaatgtttgcttgggtttgtgtagttatttttcagtttatcatgtgcctctcttgctggaatgtaagctacaatcatatagggatcttgaaaacctgtactttaaaaaaataatttcaacttttattttagattcggtggatactggtgcacgtttgttacatgagcatatggtactggaggtcctagccagagcaatcaggcaagagaaagaaataaaagtcatccaagcagaaagagaagttgaactgtctctctgcttgtaacagaaaacccgaaagactctgccaaaaggctcttagaaccgataaatgccttctaaagtttcaggatacaaaatcaatgttaaaaaatcggtagcatttctatacatcaataatgtttaagctgagagtccaatcaataacacaatcccatttacataagtcacaaaaataacaaaatacctaggaatacagctatccaaggaggtgaaaggtcattacagggaaaactacaaaacactgctgtacttttaaagcaagcagtaagcaaggctgcactttggaggtgtgaggtgtggagagatagtgcctcatctctcaaggttgttcactgcaagtacaatcctgagaatggccatggcccaaaaacacaaagaagcaggagatattgatggcatgtctccaaacactgtgttaactcccttcgctgaggaagaagagaaaatgtttctgttgaaaaatgtctttttctacttcctatgtaatgcctctaatccaataattaacataattttataaattatattttttgtgtttcaagattatagacttcggtttaagaatctggtttttcatagctctttttgtgagaaaaatacacacacacacacatctccacattacaatgtgtgtgtgtatgtgtgtgtaaacatttatttggtagcttaggcataaagtatggtttttccttggcatcctcgggggactgcttccaggaccccctgtggatgccaaaattgaagattgcttaagtctcatataaagcgacataatatttgcatataacctatgcacattctcccgtatactttaaattaaattatgtctagattacctatagtgcctaatctgtaaacagttgttatgctgtattgatttttttatttttatttttaattattgttgtttttaaattttattcttatttttctattttattttattattattatttttttgagatgtagtcttgctctgtcgcccaggctcgagtgcagtggtatgattcagctcactgcaacctctgcctcccgggttcaagcgattctcgtgcctcagcctcccgagtagctgggattacaggcgctcgccaccacgcctggctaattttttgtatttttagtagagatggggtttcaccgccaccgcacccggccgttgtttatttttatttttttgctaattttgatccatggttggttgaatccatgaatgtggaagctttggatatggaaggtggattgtactgcagtttgaaatatagctaaatttttagaaggattttaatataaaattctaaagcagaactataatgcaggagactgctcatgtcctgatagaatcattttcaggttatataatctgttcaaaatacttgttttccaataaaaggaagttgttttccataatcggttttttggcagaagtctcatttattgtagtaatctgtacaggtatttatttatttatttatttatttatttatttttgagacagagtctcgctctgtcgcccagactggagtgcagtggcgcgatctccgctcactgcaagctccgcctcccgggttcacgccattctcctgcctcagcctcccgagtagctgagactacaggcgcccgccaccacgcccggctgattttttgtatttctagtagagacggggtttcaccgtgttagccaggatggtctctatctcctcacctcgtgatccgcctgcctcggcctcccaaagtgctggattacaggtgtgagccaccgggccgtcctttatttttaataaatattatcctctgctattatcaaatatttgggtgagcactctaaaagtataaattgttaaatgaaacagagtatttgatattactttttccatattactagaacttataaaaagaggttagaaatttttttgtgtgtatccttatattactttctaattttcttttctttttttttttttcttttgagatggagtttctttccctcttgtcacccaggctggagggcagtggcgtgatctcctggcttactgcaacctccaactcctgggtctatgcgagtctcctgcctcagcctcccaagtagctgggattataggcatgcgccaccacgcctggctaatttttgtatttttagtagagttggggtttcaccatgttggccaggatggtctcaatttcttcacctcatgatccgcctgcctcggcctcccaaagtgctgggattataggcgtgagccactgcgcacggcccactttctaattttctcttggcatatcatagttgtataatcacattatacagcacataatatctagagcctgtcatagtttcaaatttcaaacattgccatatattagttctgtcaccttggtcaatttatataattatgcctccattttttcatctataaaatgtaggtttcttatgtgttattgcaagaaataaacaaatgaatatatgtagaatgtttagaacagtgccaggcacaaaaataagaaacgtataaatgttagctagtattattatagcaagcaaattgtaaagtccacatttttttttttttttttttgagaaggagtctcactcttgtcacccaggcaagtgcagtggcacgatcttggctcactgcaatctccacctccaggattcaagcaattctcctgtctcagcctcccaagtagctgggactacaggtgcctgccattacacctggctaatttttgttttttttttttttagtagagacagggtttcacgatgttgatcaggctagttttgaactcctgacctccagtgatccacccaccttggcctcccaaagtgctgggattacaggcctgagccacctcatccagacataaagtccacttttcatgttctcacttgaatctccttaagtttctgatacagagttcacacagtaggtcgagagcaaaggctgttggatattttacaaaagaacactaaataatccattttaaaagatgtttaccagttgggtcttaccagatctccatggagtgcataaatgttatttgaaaagctagaaggctcttccaaaatttgagcaatatactctacccaaggacaaaatgaaaaattattaaacaggtatttgatagctaaattgggataaagtctttataagaacagtaagaggtttgcatctaattatgctcatttaaaaatccattacttaaccattaattagacaaaaagagaagaaagagtatgacttcatttttatctaattaataggaattttggaatgcgcagttccagaaaagcttatctcctagagtgttatagtcatcactttaaaattaattatttttaagtcaaagtgatgagaagtgcactacaaaaaattcaatgtttgttttgactaaagaaaatattatgaatataataatataatattaaaaacaaaccaaatacactaactagcatttagaatgagtgaactttcattatttcccagtgtatataatggcaaacttgcacagtcacttgattttatagaaaaaaaagaatataaagagttctgctaatttcatgtgccatcgcttattttatctgcattaatttaaagatatagtctgcctgtgcccaataaaaacatctgtattgcaaaatttaataatttatattcatatattcgtatagttgtacttgtctttgatgaatattatcactgaaaaaaattgttgagtgatctgtttctttcccttttctttttgttttctctttctcacacacaaacacagaacactcaatcacatgtttaaaaaaaatgaatcagtcttttctaatattttcccttatctatttaatcctttgtttaaaaaatggctataaatttcatgtatttaaaagtaaacagacttccattttacatattcagcctgcatttattgaaaagggaacaaagaaagaaaggtatcacgtagttgcatgctgtcaggtaacatttttataataattcatgtgattccttttgtacatatctattcttgagttgattgtattcaggcgaacctgagtcacttctgttaatgtcacaatgagggctgagtccattaattctacttcactacacactgagtctgtgatagggatacaactcctctttctagctcatcttttagtaaacttttgttattcaattatgacacataaataaaatgaacagatcttaaattacaccttgatacattttacaaaatgaacaaattctttaaccactaaaatcaaaatagagaatattgtcagtactccagagtccttccttcttgccctgtccctcactaaagtgactattattttgacttctgtcatcagagattagtttgttcttttatttgaaatttatataaataaaatcttacagtacacacatttttgtatctggcttctttttcccaaaatcatgtctgtgagattcatccatgttacatgtaacattactatagaattctcatccctgtatgatattctattgtatgaatacatcacaatttattcattttactatagatgaacacttgcattgttttcagtttcatgatattatgaataacttgctacaaatatttttagacatcagttggagcacatgtgtgttatatatgtaaatagaacctctggatcttagagtataaacatgttcaaattcattagactatcaattttcccaaattggctgtactagtttttaaattccaccagcagtatatgaaaattgtagttgctacactatcttgacaatattatatattgtcacttatttttaatttttgctattatggcttaattaatattggatttttattttcctaacaactaataatgtacatcttttataagcatattggcatctttttatgtagtttctgttcatatttagtaaagtgctcactcaatattctccctttttctaaaaaattgagttttttatattcttaaatgaaataatgtataagaagtatgtctcttttacctatatatcatatattttatattactcatatatagatacatattctctcaacctatggcttccatgtttacttttaatactgagttttagttaagagaagaacttaattttaaaagtctaatctcacaattctctcttttatggttagtgctttccctcttctatttaagaaactcttgtacaactccagaatcataatttatttatattatagaatttcttttaacatttctaaactgtaatgtggaaacattttcgtgttcattaatctacataaatatagaacataaatatataagtgatctggtgcaatatattgaaaagaccacatttcccttactgcaccttccctagtatgatatcttgctgtaaataagttaattctattcatatgcatctgtttctggattttctaatctattccattggtttattttttctttccttctggtagtacaacaatgtattaagtcttaatatgtcttgttatcctgcaggatgaatcttccaactctcttcttcctcaggattctctacccactttcaaagtccttcaatataatactgaagagatgtggtgataaatgacatcctactctagtttttgatctcaggatgtaagtttttgaaactgcagcattagcatgatgtatacttgtagaattttgaaaataacctttatcagattaaaaaacttcacttttgcttctaagtagaccagggcttctactgaaacaataagaatagctgaataaattacaaaagttgtatttctaaaggaattagaggacagaagaaataatgaggattaaagtgactgaaactccagagagaatagagctgttcaaaggtgaatgaagatgtgcactggccttttccaggttgcatttgcccattcagaattggcagaagtggagaatactggcttcgcccaggcattagtcatttcctggggaataagaagtcagtagaggccgggtgcagtggctcacacctgtaatcccagcactttgggaggctgaggtgggcagatcatgaggtcaggagttcgagaccagcctgaccaacatggtgaaaccccctgtctactaaaaatacaaaaattatccaggcgtggtggcatgcgcctataatcccagctacttgggaggctgaggcaagagaatcccttgaacccgggaggcagaggttgcagtgagccgagatcgcaccactgcactctaggtgacagaatgaaattctgtctcaaaaaaagaaaaaaaaaatccactgaaactctgtctcaaaaaaaaaaaaaaagtcagtagaagttttagtagttgtgcaaagatacagtgacaaaatcagagacttaatggggtctaaaacacagagttggttttctcccaaagacgtgcctcacgttctgaagcttcctgtagcaagagactaaaaaaaaataaagcaaaagattttggaaaacacagcaaaactcctacagtcttggagtgctggagaaacagacacattccccaaactctcacccaaaatcctcaaacagccaagtgttaaggatgaagggtaagccacaaggagactgagtcctaaggactgcaaccaactttacccatgctcaggcctcgattggattaagtgatcaatttccaaacctcttctggtgaaagttacatcatctaatgcctgtattttttatagtaaataaacagcatgcaattaataattattctgcttgtgcaataggagcatatgccaatatcacaaagaaacaaacaaaaatacaagcagattctgtttttcaggttagcagataagaacttaagatacttaagattaatatacaaaagaaaaagaagaaaaggaaaaaatattgactgaaaagtgaggaatttcagtggaaaattagaatctataaatagatttagaacaacagtctagaaacaaaaatgtgacctatgaacttaagaactcaactgataggttaacaatggatcagacacagatgataagagttctgaactggatcaatgtaaaatatacaaactgaagcacagagaaaaagaaaaagaaaagcacataagagacatatagaacatacttataatgtgttaaataacctgtaattagagtctcagaatgaggtggggaatgtaagagggggttagcattattcagagaaaaaagtggctgaacatattatattatctttatgttgtttcttaaggcgtaatagtgaaatagtatgaagtattaaatgatgaccttaaaaaaaatcttttatctgaaatattccaacacagttttaaatgtgagatagatctgagtttactgcctcaaaaatttataatcagaaacattttaagccaaacagcatctctaggatgatttatctgaaacccctttgttttatttctgaggtcacaaagggattgaaagacttgctaaaggttctagagcagataacgcctcaactttccatcttattctatttatggagacactttccgtgaacctgattactaatatgacccaattgcagtagctgggggtgggggaacaagtaaatatttccttgtttactctgtaaagcattcagttatgcactaaaaataagaaagaggatactttgggaaataattctctgactgttctagtttatctaagtgaacctaaataaaacaattattacgatattataaattggctctgggaatctccagctctgttttttgttccattagatatgtaccatcttaccaagtttcctgatcctgtgaatttcttgtaagttctacctcatttctcattctgtttatgtattgacttacagtcctgaacacccaactctttatctaatattgtgttgtctgttattccttctactaaaagtcagaatgtgaatcctggctctctgccccttatcagccatgcaatttgggcaaattatctgcttctgagccttgttttctttatatgtaaaattagcataataaatataacacctgcatagttgaagctcaatttatatcattgtgtgtttcttaaacattaaaattctactgtttattaatcataaaattaatttaagaatgagataagtgaatagtttctaccataggcaggtgttaagccaattacattaaacaaaattctagaaataaagtactttgatgagggctcagcagatacggtccataggccaaatcctgttcaccacctatttttataaataaagttttattggaacacaaccatatccatttgcttacataataaatatggctgctttgctgttaaaaaggcaactatatttgtgtagttgcaatcgactgggtaactcacaaaacctgaaatatttattagctagccttttacagaaaaacagttcactgacctcatcttaaagcattgcctggcataacaatacacattaattgtgtattgtcaaccaacccttttcaaaataatacaaaatccagacttcattatagttcttaaatacttactgataagtttgattggtatttaggaaatccacgccaatttttatgaattctacattaaaagagcattttttgctagtatgctttcctttttctgtgggtgaaaacaaatttctggtgtattatttttaaatttaagagtagtaattatgcacagctgaagtaaatacattttgcataataattaatgatttatagagtctactaaggctagtttgagctattggatataatgtgcattttttctcttaacaatcctcataaatcaagatttactcatattaaataatactaaaaaagaaactcatttctcttttgctgttgtatacaagaacattaaacatataactttcatttaatttcagatagttaatataaaacattgcagaggaaatggatatctattttggaaagatggaggcaattgttgtctatggcaagacagagaaaacacatttctttctacttgaaactaagattatttataaaaggaaaactacctaggagatgatgactgggtaaagcttgtctaaccagagccatggcttcttcctcatgctattcctggaaaccaccttttaaaattgttcccataagatgttggatcatacccaatgtgaaaccatcaaaagataattgttataatagcaacaataataagtgccataatgagtcactagacatctgtatttacatgctgagggattatgtcttagtttctatatccaaagttagggttgtaattattatacataagttaccattatgcccaggtaggacatttaatatacactcaataaataattatttattgaataacaaacagtttaccttgcattataaggaaatctgactagatgagaaggaattttagtaactatagaaatcagtaatgattctaacatgatcaaaacgtcagcatatgtggaacatgaaagttagaagttttattgctctatgatatagtaaaacaaactatggaacaaacgctaatggtgaaaaataaagaaaagctatgagaaacagtatatagaaaaaaatcatcagaagttgatgattaattcagtgtgaagtaatggattaaggaaaatgaaatcaaggaagtcctcattcccactgtatgaaaaaatcatatttaggaataatttcaataaagaattatggatattgagatgatggataattccatgatacatttagttttaatgaagaaaagattatgtcaagctaaatcttagaatttggaagaaggggaaaaaagtaaaacagaaatggccaggttccaaagacataaaacagtgcgttgttggaactgaagaaaatagttccaagaagttccatacaaatactaaacgatcaaaaagccctgaaaaaaaatgacactatatttgatagtttgtatgccacagtcaaccttgttaatatcattttggtaaaataaggggagtggaaaccttgctatggagccagcgttctgacacatggaaatgaaggcaattagggcaaacatatgtttgagaaattggggtgtcaaataaaatgaatagtaactctagagagtcacagcacgaggagtaatattttcttttacaaggtagaagaggccaaaggttttcctacttaagacagaaatagcataaagaatgagcttgcatgtacaagaaagactgagaaaataagtaggaaggagtttaaaaagggggatggaatcttcagcaatcatttgattctttgtctctttgctcacctaatcctctaagttaaagctatttcaccttcatctatggctcaaagtcaataataattgtatattttaaaataaagaatgtgattggattgtttgtaactcaaaggataaatgcttgaggggatggatagcccattctccatgatgtgcttatttcacattgcatgtctgtatcaaaacatctcatttaccccacaaataaataaacatatttacatttatttatatatttatataatatataaaatattagtgacaatgaataataataatatataaaatatttattatatatttattatatattcatttataaatatatatatttatacatatgtatgtactcagtacccacacaaatttaaaaaataataaaaaatctaaaaaggaaacccatatcaggattcaaaactaatattttcttgagagaggacacatatcaaagacaaagtcacccttagaagtgtcaggagctctttgctctgcaattacacatgtatacactgcccagtagcaatggctaagataagcaaattgaaaatggagaccagtttagctttccagatcctttgtgagtctgtttgacctaaggatgtctaatagcatcatggaaataagaccagaggctcctagtcattttggcacgagggaccagtttcatggaagacagtttaaccacagaccaggtgttggggaggttgtggatgattcaaatgcattacatttgttgtgcactttatttctattattattacattgtaatatataataaaacagttgtgcaactcaccataatgtagaatcagtgggagccctgagcttgttttcctgcaactagatggtcccatctgggggtgatgggagacagtgacagatcatcaggcattggatactcataaggagcgtgcaacctagatccctttcgtgtgcagttcatagtagggtttgcgctcctgtgagaatctaatgctgctgctgatctgtcaggaggtggagctcaggtggtaatgcaagcaatggggagtggctgtaaatacagatgaagctttgcttgcttgcccaccactcatctcctgctgtgtggcccagttcttaacatgccaccatggaccagcactagtctgtggcctaggggttgggaactcctgaattagacaatgaggcctctgaaaaacaagattctaggataaattttgataaggttatataattccttcttggtgatttccctttcaattagcttgcctaatactattccatcttatggaatggaggcctactaaatatctaacagtcccattttggaggttttatcattgagaattgtatccagtgatcttatttttggttaacaatggacaccttttgataaggaccagataagttggaaagcaaaaccaacaaacaaaatgaagttgtcaatcaaacaagcgaaataaaggatacttctgtgtggttcagatatctttgtgtcaagacatcattgagcaaaggggatttgtgtcctcagttgaagaaagtagaaaattaaatcctaagaatccaaatttaactaaggatatctactgttttaaaacccattgctctcacaaaattgcaatcataaaacaagaagaaaataaaactgtggtgtaacagagctacaaaacatcagtaaggaaccaagcaaataaaaaagacatgtaatattttcgcagacttcagtcctatgtctctattgcctggataattggtatgaatgtgccagtcagtcaaagcatacatagcatttggtgcaatgacgtctcccatttgtaacataaaaataagattgttattttcataacagatcaccacattgtactcttttaattattagacttaaagcttatattgatctctttgattcctgatccagaagagcctttgcaaaccaagactactcgctcctgtggggcatcagtttttcaggttgataagagttgcagtaccttgaggaatttccagtgctattggcttcaccccttcttcaagctactgacattcttgtccttcattggtacttacgacattgtttgaccaagtggaaggcccatatagttgttaaattcacttctcttcacatctgagccatttcaggtattttttttttttttttttttgagatggagtctcgctctgtcgcccaggccagagtgcagtggcgcgatctcggctcactgcaagctccgcctcctgggttcacgccattctcctgcctcagcctcccgagtagctgggactacaggcgcccaccactacgaccggctaattatttttgtatttttagtagagacggggtttcaccgtgttagccaggatggtctcgatctcctgacctcgtgatccgcccgtcttggcctcccaaagtgctgggattacaggtgtgagccactgcgcctggcccaggcctttttatatgctgaaaaactaaacagtggaagcaaccctatctgtatgctactcctgcctggaactcatgagcaacttccttacctgctaaaaaagagggtggctgtgtctgaggcaaaagtcattgttgtttgtttaattttaattacaagcaaaattaagtctaaacatgagacttagaagccaaaccaaatcgaagctattggaattggcgcactattctgcctgccacatggcagggtgcagtctcaacaacccttccgtgccttacatccttaagaactagaatcttgggtctggctggcattttgaagaaggcacatccaagcagaagagaagcacattattgaaatcagagaagcctcagagccattccactatgataatttactgtctgcacttttaaaaggctaatttagaagtggagtaagctcctagttttatgtttacacactgccctttttcgttattgcagctgaccctttctcaactcgatgatgaatctgagattcttatacctctttccaaataattttaagagacaaaactcatcttcaactgaagggaataaataactcagagatggcattggaatccttactaggggggcttaggtcaggaaaggcaaagtttttctatggtgtgtgcctcaaacataagcctctggctagagtcaggacttagtaatcataagagtccttttcagcctctctcctaacttcacatattagtgcatgcgtttgttacaaccaaaccagactctactgtttcaggatgcagttcattctaaagcttttttccaaaggggatatccaaatctcccaacaggtgcgttcaaaagacctccagtccatactcagatggctttgacctatttccaccctccgagtctaaccactaccctcttcagtaccattcacacctcaaggacattatccgggtagactccccttatttagtgtatatggactggtgttctccacagcacacagagaacttccgatgaattggtctcttcagttacaattcagtctctctctactgaagcctctggaatagtcagtgacttaggatatgaacataaacactgctctgtcccagcttgaggtctgggttcagatcttgcattgggtgactgaaggttccagcctttgcttcctgattaactagaatctctcccagccaggtgtggtggctcatgcctgtaatcgcagcacattgggagccgaggcaggtggatcatttgagctcaggagtttaagaccagcctgggcaacatagtgaaacactgtctctacaaaaaaaaaaaaaaaaaaagaaagaaagaaaaattagctgggtgtgatggcgtgaacctgtagtcgcagctacttggggggctgaggcaagaggattccctaagtccaggaggttgccatcacaccactgcacaccagcctgggtgacagagtgagaccctgtctcaaaaaataaaaaaatctgtcaatgcttggttcttacctagtgctctaaataggttcttgttaacattaccaaagaaggtaggaataagaagaaatttattttcagaatatgaattgatgaaaaaattcttaatcacagttgtcttcagaataaaaaaaataagggattgttattttacaatttagtaaatattccccatgtgtttcagtatgttaaaagaattcagtaaatatcacaattcaattaaatcagcccaggttttatggcggtgacccctcatgactggccaattttaaggcaacttgattaatattcttttattgattcacagaaaaggaaatcattcattggtccctgtgggcataccctataaagcttctgggcgtgagacagtgtgagcaacaggttgtccctgccgctccctggatccaaacaggtctttcagagttgacagaatagttattagagacggcctttcctttccttgattgccttcaactgaatgttctaaagatatagaatgtggtattcacttattctcattaattcatcactttcaagcttaaactcttttattaaagaaaaaaaactgaggaccaggtcaaactgcaattctggtgtttatttgaaacaaaagtcatgaaacaataggcttataaaaatgaaaggatcgtgagaattttagccattctcttcccctcaaaaatgagctgtgtattatctatgtaggatggtcatctagaatttgtgtaggtacttaatttcatcattcatttattcaacaaacatttgttgatctctataaaatgtcaggtggtgttctgtgcccttgtagtcatcagtgaacaaaatagccaaagattactgcctttttttgaagtatacattctagttggcagtgtcagacaagcaaaaatatatataataaaaagataattatatcttattttaggaaaatagttctatagaaataaaaggaagaaaggcagagccaagttaaaaaaaaaaagattgaaagtgctagagttaggtggatagacatggttccatgttacagaagttggtcagggcaagcttaattgggaatggttaagtaaagtctagaaggaggtaagagagaaagccttgagactacctgggaaaattgcttttcaaagctagtaggtgccatacgatggagctatgtctgatgtgtgtgaggaaagacaaagttttagtgagggaatgagagcacagatggggaggtcaggtaggtcacagaggcttttgggggtactacaggtcactgtaaacaaacttagggtttttgctttgttttgtaacttttactttaagttcaagggttcaagtgcgggtttgttacatagatacgcttgtgttatggtggtttgttgtacagattatttcatcacccaggtattaagcccagtacacattagttatttttcctgatcctctccctcctcccctcctctaccctctgatgggccccactgtaaatgtttgttggattttgctggtaacatacatatatgctgcatatcttcttttaagtatcaaatagtacatcatcgaaaataaaatataatttaacctgctgttttatagtatttcctttcttatccaaaactttaatgctgtgcatgaccaaggtcttttgataatagcatattctcatgtgaatcagtaaaactggatcacaatgaacagttttggaaattcttggtaagttggcctcttagccttgaatatgcctatcctaatcccttctgtcgtgttagaggaactttttttttgtttcttcttttcgtgagtagtaatagacttgttcctactggttaaatgcctgagctttcttttttgtaccataaatcataggacagtacatcttcacattatctggaaaaacacactaagaaaaaaacaaaaacacatgcatttcctccatgcccttgaatactttgcaaggtccctggaataacagtactctctgcttccctgtttagtcacataaggaaacctatagatggcaccactgctgccagtagccatcttgctgtaatacgagccaaacttcagaaaaagggcagtgaaatggacttagaatcccagtaaactttgtatcaaaccaaacttagagctcactctgtctttaaatttttcaggtgtaagtaaaatgtttgcttatttttaaagcttctttgaattaagaatattaatacaggcaacatatgtacttctaatgcaatatctaagaacaattgcctccaacaaaaaaggcataaaatgtatttctcaagaaatgtcactttttttagcaagaacatcagcttcagcttgcaggaagttaattgaaaatccccatagatagaaatgactgaagtgaatgcccttcaggtcaataaagcattgctcagttccttaggtcttttgataaacttgcagttcatttggcttcccctgctgttgttcattaataatcactgaagcttaataattatttcctaatgcttatcacttatttttccaccccactttattactgtctcacattagttaccttgctcccattgtgcgtgtgtgtgcatatatgtgtatttattttccaatagcatggttttattttgcaatttttttatcttttaaaatgaagatgggaaaactctaatatataatttcaatgtatttaaaaatgaattattttggactgtaatgtgaaagtaaatgtagtcataaccgaaagcaattttgaaagttctaaatgaatccttattttcttttaaaaacattaaattacagtggttggatgtgtctgatgagcttcccccttacctttcaaaatgtttgctttggatataaatatatttttataactcagttaatttgcatatacattcaattttcaccccaatccaaaatccaaacccctgctatttttctgtctgcaccccacctgtggtaacactgtcacgttgtgattttcaagcttaatttctgtcttcaaaagcaacagaagcagttttgtgtttaagccaacagagtcctagtttaaaatttctctcttttctcatttgcacatttttaatattccttttatcgcattccccccacatacatcttgaaaagaaataaaatatctcaagtgattcaactttaagtactgtatttgccaacaaggcattgaaaacaaaatactctcaaactgcaggatattttataatcacaaatttgctcattcccattatccccaaggggctaaagcacatattattattccattaaggaaatgaagactctccgagccaagcaatcctctctttagctccctcctcccattcccatgttctaaaactttctctgcataaatagttctcaaactttgttagctataaccttgtgacttgcagaagattcttaagggtcactcctgcagggattcttaagaggtaatccaggttggttctgttttcccacttgaaacaaagcagctcagcctttgcattgtatgttgtaggtctgtctcatattgtacttggaaaaatgaaaattaaaaaggaacttggtgttcaacatggctgaacataattttttaattaagagtttatccatgaatacagtactctagatttttcctagaagctacccaaatcaacacaaaataacgatgacaaaaatccaaaacagtcaaagcaaaatttaacatttatatttttctctaaaaatatttctatactaaaataattcatgaaaaatattgcttgtatttaatatacaaattcattctattattttttcaaaatgacatatagttattttgacctatagaatccatcaggcaccaagattggggtagatccctcttaaaattaatctgttttatcatatacaatttatttatgaaagttttcttctatttctacttgtttttgtataagtgtgtgctaaattttatcaaatgctttctctagatctattcatatgtttatacttttttctttatactttaatgtggaaaattacactgagttttttcttagtcttttagataattctgatgtaaaggggcatgacttttttccttggagaaatgctcagtgcaactgacgttatgatttgacctgttactttttgagattaattaaaaattatcatttcccagagtatcatgaatgttgttctaattatttagaataaatccaaagtaattgcatatttataatgtgttgacaatgtttgaattaaaggcccagaatagccttttccaagatgtgttctgttgatttctaacttcacagaatgctcaaattgactttcatgcttatatacatttgggaaacaacacacactagatcttaggaatcttaggatttacttaggaaatcaaagtatatgttagcagattaaaggttcttataagttctgtggaatacatttattcatcttttttactgaaggacctctttctttgcaaacatttgacagcttttgaagccattaacacacttgcggaaagttctgtcttttgtagatgaggatttttgaaaagctttatcaagttagagtttattaacttgtgataatctggagatttaccaaacctatgctttcctttaaaatatatataaaaatataatttctgattctataaagagtttaagactatctatataagaagcaaagacatcattgaatgttcatatctaaataatagttaaacttctatgtaggcacaggtgtcccttttaactatctcttatttttgcaaaaacaaatattttatttctaactctttaagcataagttaaattaaagccccaaaaaaccacttactgaagaggaatgaaaaataaatcatgacaaaaaaagtaggcttttaaaattgcaagtggcaattgcgctttatacatgtacaaaagagtttaaacttgctataccaaaacctcatttacctgaagtacaataattctaaatttttaacagcttaacctgctaaaggaatctggtgaaattaacctttttaatatctgtgaaagaggatatagaaatcaaattaaaatcatggaagcaataattcagtgaataccataatttctttcttcttttgtgactacttaatatcttaattaaaaatctctcttatctatttgcaaaagcatttacaaactctaacattgagtagccttaccccaagccagtcaatgtgcatgaactggaagatgatttgcagatagataacttttaaattgcttctttattaactacaataacacaaggtatctttcatttctttcatacgcaacttctttctgagtcttccaattctttgtcacccttctcctgaggtcagggaaaatatgcaaggtatttctgaggagaatggtatgactaagcaaatctttaatccataaagttttcttgatcttcttatgtaataatggcataaaagaatggagactaatatttactgagcagctaattggtataaacaccatgtcgggagcttcctatgccttttaagccttacagcaaacctccaaacatctccattttgctgatgagcaaaagtctagaaaggtcattcagtaaataagtagtgggcttgaacatgaagtcaaattcatcttgctctcaacgctatgttttttctaccctgtcacttgctttactgtatgaaaatgtctcgttttaaagtgtactttaacatttttggaattatggtccttcgattaatacttgagatattctctgcttcctttacagtggagaaaaatgaggttaattatagaaaagactcaacccttgatcattaatccctagtaagaagaaaaggtgggattagaatatatgcttttttattccacatgctggtgttttttgtttgtttgtttgtttcaatgtcttgcttctttaggcatgcttgccctgttgtttccattaccctagaaggcctttatgcatataagcaaatctctctattatgttaaatcttcctacccacaatattccgtagactaccttttgttacaagccatttcattggattcagatcagtcactgaaacatgatcctcccatcagtacctgaaactcatttaactcatgatgtgaacctgacgctaacttttgaagaaattcattgtggccattggtaccataaaaaataagagagtttcagcttaagttctaatgttcttatttattgtttatgaaagttatacccaatgtaaagcaggatgcttgagaaaaaaatagagccagaacagttaaaattaatacataacaagatggtacaaggcctctgagttgagttaatcaatgcagttgataacccaacagtaactgcactagcaaggtggacattttaaaatgatttaattttaaaaactcagactttttgttcccttaacttccaaatcactgtatttatattctttcctattgtgatcccattttatattttattcttcttgagcctgcaaaatattacaataaattttgatgtttactcctcttttgcaaagatagcctaacaaataattcttgatttattaaaaaacaacaaaccaacaactgagaacaatacttcattgtgctttgtcctttttgttgttgttgttatgaagggaatgtaaagcactctgttttgaaatgaatagatgaatgataatgtgctcttcaatgggacactgtctcaaaacctattttatctccgtgactgggatcttctatgtgcctcagtcagctggttgatcagcactaggtgctgggacaagagccagcctggcctaacaaaggagtatggaattgccttgagctctcaggaccagaccaaccatttttgtatcactcaacatagatgaacaatacagaaactgaccccagattcatcactttacaaccctttcaaaatatccaaataaataaaatgtctccatttactcaaatgtttagttttaaaatacagattgtattgaaaaagtctgatatattattttctccatagtacatgttgcaaactaattttttttagcaaaaatagctaacacttagtgaatatatactttattctaagcactctccaagctgccttctcacttaatcttcacatgaacccaattagtacatactattgttattaaggttgttaaaatgggaaaagtaaggtgtggaaaggttaacatgacatacctagggtttcatggctaatatgaggatgagtcagattagaaactggtaagtatggtattacaacctatcatttattatttcattaacgtcgtcacgcttaccatgctggctaaattaagttatctgaaagactattttgttcttataagagtgttggcgctattaggcaagaatattttcttcctatgtaagactgagctggaaaaaggggattcagaactgtaatcatcgaggaaacttcttttcctaggttatagggaaagaggaacaaaacattgctggagtgtccctgtgagaacaagagacaacaagacaacaaagtgagacttgacttactctcagagacccccccttccttggagtcagggccagcaaattcttagaaattaaaccggctatgtgctctcatagcacaagcaagccaaatgacatggtagcagcaagcaaaaaagaaatgtattttttaattgtttatttgtttaaattttatttcaatcaccttaggagtacaagtggatttttggttacatggatgagttgtggcatggtgaattctgggctttaagtgtacctgtcactcaaatagtgtatgttgtacccaatcggtaattaaaaatgaaatatatttttaaaacattttccctgtgagaagcttgaataaatcaaaacacaaacaattcgtgtcagaattgttctctagcacaaaagggatttgccagatatgaaggtaggtcactttctggagatgggacaaagcctacatatatacacaaaacctttcaaaacttatgtgtgtatatatatatatatatatgtgtgtgtgtgtgtgtgtatatatgtatatatatgtataatgtatatatataagtatatatgtgtgtatatgtacacctatatatgtatcagtatacatatatcagtatacatatatttatatagagtttatatatgatatatatactaatataataatatactgatgtattagtatatatcatatataatatgtatactaatatattagtgtatatatcttatataatgattatatgttagtatatataagtatatattatatatattagtatatatattaatatatattattaattatcttctgcaaacctttctaagttgctgcatggattctgtaattccggacttcttttcccctttactgtcaatcctaaggcaacaggaatacttaacaacaacagttattttgaaaggatgcttcttggcccttctcgctaactgcttaaatcattcctctgtgttaagaaatgaaaaaaaaaatccttactcaattcctggtggtttctagttgattgacttctaatgagctatctggcatcagcagctccatgaggctgaaaagatttttcccattctctgatttaggccagtcttgcgttcagtttgaacatttttgcatagctcattcaatgcacgaaaatgaatatagaccacaaagaaatgttctttaaaaactatgtcagagacaaagatgtcttatatcatttttaatccatcactacaaataaatataaatgggctgggcgtggtgactcatgcctgtaatcccagcactttgggaggccaaggcaggaggatcacttgaggtcaggagtttgaaaccagtctggctcgtttcaccctgaaaccccatctgtaccaaaaaatacaaaaaattatccaggcgtgatgatgcatgcctgtagtcccagctactcaggaggctgaggcatgagaatcacttgaacccaggaagtggaggccgaagtgagcagagatcatgccactgcactccagtctgggtggcagtgtgagaccctgtataaaaaataattatgcgtgtgtgtgtgtgtgtgtgtgtgtgtgtatatatgtatatgtgtgtgtgtgtgtttgtgtgtgtgtggtaattaacaacatacataatacttaaccaagccccttattttttccacttttaccacacaagttacttgaagagaaattgttgtcatttttcatgatcatttcctcaccatagggagttagaagcataaatagacatttgcaataaccccatcctcccaaacgtcctcttctccagctcccaagtttcttcttttgctcttttcttcctgttccctctttccatttctcaatctctgtttgagttaacattagcttagaagagcaatggattctgagaccttctacgcattctagttcgttttgttaccaaataagtacttaattcgttgaaagaaagaatctgatttcattaatgaggaaataaagtatgtgttcaacccaggaacaagaaaagaacaaaaaatcagcaagatggctataagggtaggttatagaaccagacaggtggcttcaaatatgggcccctttcctttgctaatgacgtgaacttggttgacttgttcacactcaaaagactcaatcttttcatctgccaaatgggattcatgtcagttttctaggaaatcagcaggcttaataaatagcatccctctttcccatccatgttctaaaaatgttgagaaagtgtgaaaaaaagaagcagatggggtcaaaattttcaccttgattcatgataactactaagtgagatgatgtagcttagtgtctgagccaaataaacctaccaagtaaatatgagactgagacacttaaccacctgcacatgccagaccagacctgaaatgcaaagaccacaaaggttacacatcgggcatggaggtacgtcacctactgactttttgatgggagaggaggagaagaagaagtaaataaaagaaaaaaggaagagctgaagtcagtacacccaaattattgtcctcaaatttactagttcgatgaatcatcttattacttctggtaaaatagtgattaaaggttagaaaaagacagaagtgtttatatcgggggaaacttcaggggctggaaagaactattcccccataattttcccccaggtttctgaggtcttaaccctttgtgtctagacattgcactcatcatcagtcaataagccgctacccactcagggaaggagagcagcatttttttttacaacagccttgtgtccaggttcttgtacttttccaataccagccatacctccactgggttgtctcctagacctacaagtggctgttttacattttgttcccagaagactctggaatgagtcacaataaaatgttaaataaatggactctaaggtggtattttacccaaagctgaaaattcataccctgatctctttcttaacctcgaactatgtccagccatattattcaatgtagcctactagggcactgcaaaaagtttgaatgtaaacctcatgagtcaataataaaatttctcccaactagggattccagaaagaagttaattcaagtagtcttttgcttgttaaagtttgtttcttatatataatagtccaaaagaaccccccatcgaattcttttttatttgcaaattacagataattttgcaaatgtaagattatatatatatatatgtatatggtcatgtgccacataatgacgtttcagtcaaggatggaccacatgtatgaaagtagtcccataagattataatggagctgaaaaattgctatagcctgctgacttcttagcctttgtagtcatatcacaatgcattagtcacatgtttgtggtgatgctggtataaacacaactattgctctgccagtcttacaaaagtctagcacaggcaactatgtatagtacataatactagactgttataataaattactatgttactggtttatgtatttactgtgttatatttttatggttattttaaagtatactcctacttacaaaaaatatgttaactgtaaaacagcctcaggcaggtccttgtaggagggattccagaagaaggcattgttatcatagaagatgacaggttcatgcatgttattgcccctgaagacagcgggacaagaggtgaagaagaaaaacagtgatattgatgaccatgactgtgtgttgtctcaggctactgtgtgtgtttgtgttttagtctttaacaaaaatgttttaaaattaaaaaataaaataaaaagaagaaagtgtatagaataagtacataaagaagaaatattttttgtacagctgtacaatgagtgttttaaactaagcgttattacaaaaaaagtcaaaaagttaaaaaacgtgagaaagtttataaagtaaaaaagttacagtaagctaaggttaatttattgttgaagaaaaatattttaaatacatttagtgtatcctaagtgtacagtgtttataaagtctaaagtagtatacagtaatctcctagaccttcacattcactaccactcactcacagactcacccaaagcaacttccagtcctgtaagctccattcatggtataccagtgtgctatacaggtgtactatatttcatttttcatcgagtatttttactgtaccttttctatatttagatacataaataccattgtgttacaattactgacaatattccttgaagtcatatacaggtttatagtctaggagcaataggctataccatacgacctaagtgtatagtagcatctaccatctaggtttgtgtaagtacactccatgatgttcgcacaacaacaaaatcaccttaggatgcatttctcagaatgtatccccatcattaagcactgcatgactgtatgtgtatgtatatatatgtatttatttacatacatatataataaaatggatcccaccctgccttttttattttcaacttttattttaagttcaggtgtataagtgcaggtttgttgcataggtaaaattgtgtcacgggggtttgttctacagattatttcatcacccagacactaagcctagtactcattactatttttcctgatcctctccctcctctcaccctccaccctctgataggtcctagtgtgtattgttactctctatgtgtctacatgttctcatcatttagctcccacttacaagtgagaatatgtggtatttggttttctgttcctgtgttagtttgctaaggataatggcctccagctccgtccatgtccctgcaaatgatgtgatctcatttctttttgtggctgcattgtattccatggtgtatgtgtaccacattttctttatccagtctgtcattcatgggcattttggtagattctatgtctttgctattgtaaatagtcctacaatgaacatacatgtgcttgtgtctttataaaagaatgacttatattcctttgggtgtatacccagtattgggattgctgggtcaaatggtatttctgtgtttaggtctttgaggaatgaccgccctgtcttccacaatgtcaaacctgcttcttactcttctctgacttaactaaagggcatgtgatgccaatatagagttagttttccttcagcagatgcaacctgggctgttttctcaggaataggttcaattttcttcaggactttggaagttaaattagtttgacaacaagactctggtgcccatgattttctttttagagtccaatagaaataaagccacataattatcaccaagatatttagaaaataacagacttactctgagaaacattatattcctagaacctagcacttggtactgccaaaagctggagaagatatcccatgttatctgaacaaaagaagaatgcctttggtttatctttagccgagtgcctctcagttcacaccagttgcccagaatctgcaatctgtaaccttgctcagttgggaggaagctccttgcagatggttcccttggaactgtgcatttgctatcactccttgttctctcagacatcactgctttcttggcgagttaaaatttttgcaatggtgcagtcccagctccaagatcatttttttgtgttattttttcttttatatccatattttcaaaatctgttcatttatacttacaccttgagtctcatgttcttgccacccaagttccaaattgagtcagcctttgcatttaccaatgtgaccctttccactgcctcctatttttgaattacttatgtccaagacaccagtcttctacggaaaattttcactccagtcagagccaccataagaccacatgttgggaggtggttttggagtctgtaggccagcgacaggagtgcaatctttgttctttctcgatttctttgttgtctgatctacagcatctacaatttaaagattgaatcttattaatgcacatagaactcagtctggcaccaaaaactgtgacttaaccctcttacatctaaaaggccagtgcacaaactgtttttcttgtgacagattttatgctatttcaagcgttacttctagggtaagctataggaacttgccattgaggctttctgcagtggataatgcaagttggtgactgctgagatccaaacacagcctgaatcttcaccatctatgtggccagcatttgctgaggtccttataaggctgccatgactgcagagaagctataacattgttcgcatgccccgcctgaggcctgagttgcctacacatcttcagaagccctcctctgctcaaggtcagggccttgcatagaggttaagcctcattggcagagacatgtaaagcccgagaaccattcacttgaagctactcatgcatacaccgctgatattatgaaaatggctacttcactctggaagaagccacaataagcatcaccaaacatttagcacagctgattgaagccttatggcctgtccacagcagctaagagccaaggctcgagggaaaaaatctgcctaggctagtatacgcctttacaaagcaccaagataagaatgttcttcccacacactaaactcatggccccaaaccatatttcttacccacatcaaaaaccttttcatggagatcttcagcttctctaattattctctttgtctttattgctcaatatttctgcttgagtctccggggatgtgtgggaattgataccctcattctctgtatattctctgatctaaaaagattgagagatagaatatatcgggaagtcacaaatcaccatgtgcagatttccaatggacacatcaaacatgtttcaacacgataaattctcttagcctattttgagaatataaaagagtccagagaataaggagaaagaaattttatgacaatgcattctttggagaatactgcatgagtctcatctgatgccatctccagcatgagcagttggcccatccacctcaccttaatccttccagtggtttccaaagtgtaatttggagaggtgattcccatgcgtgaggggcatagccaactgaaatcctccctgtgcctgataatcctggagcatgagacatcttctgaatggtctatagagatgcttctctatgggcattgccctgcttttccagttatttccaagaacaaagaagcacaagtgcttcccagggactggatgtgggtccttgggagagctgatgagagtcatctagtccaacagaacacaccagatggaggttggagggagagggaagaatgagtgggaagagacagagtgaacatctcagggctcaggaaggagcatgagcagtcagcacctcgagtggtgagaagctggaggtgttctactcatgcattatctttcacatgaacaatagcgtcaaaagtgggcggaaagcattctccccacacagcaatgcccatttaataagtttgccatgatgattgacttggtaatgcatgtaaaaggcttaggactgcatgcttattagcctatcaccagtacctacgtgtttaacattatatgacaaatactcggtgagtgtcttagttccactctttcctaatatttattacacaccccttctcccactcctggctagtcagcttgcatgtacagtcatttctgctataatgcaacatatgtgttcctaagaatcgctgctctgtgtaacgtcaagcaattaaaaccacagagctttggataaatcggcttaggcatacaacactcatgatcagtgacacattttttaaaaagatagaaatataataaagatggcagcacatcctgtatctaagataaaagtggaaattaaaacaaaaatggtagcacagttttatccatgtgaagtggttaagaaacacatatcacattcaatatggcacctggagtttgcttgtggaagcggacagctctgtgttattgtgaagtgagggaaggagcatcctctgaaaccagacagaaagctataacaccagatgtagacgggtgtggcttgtggtcctcgtgaggtgtgtgcatttgtgtgctttgtgtatttctaggtggctcccttcagccgagtgcagttttctgtgtttacctactgcttctcatggatgaaaactcatgtaaacaaatgcaaaatttgtgttatcctcaaactgaggatgatataccaattacgttggaacaaattcatattttcaaaatgagcagaacagtacatatttacaaaccagaagccacacatcccctagcctgctttgaaaagggataatttgtaagaatgtgatctcccaagtgcaatagttagaatctttggatttaggccacgagcgtttgccaaaagaaatatataatggagaagagagttctggagacctttgttgggaaagccagaacatcctcatagagttactcaactctggctaaattatatgtgaagacctagacgacacctaaagaattattgtgcattttgaaagcaggaagaggaaaagaaaaggaggaaacaaatgactctgatcaattcttggtaataacaaaggaggaaacaaatgactctgatcaattcttggtaataacaaaggagatacgattcccactacactctcacgtgatacattcaaatggtaactacttttcgtctatttttgccaaaaatgaagacataggatcataggaaaaaaacaatgtttactaaatctatcaatcaaagccactaaatcctaattcttctatttcaagatccattaaaaagaaatttctggggccgggcgcggtggctcacgcctgtaatcccagccctttgggaggctgaggatcacgaggcggatcacgaggatcaggagatggagaccatcctggctaacacggtgaaaccccgtctctactaaaaatacaaaaaaaattagccgggcatgggggcgggcgcctgtagtcccagctacttgggaggctgaggcaggagaatggcgtgaacctgggaggcggagcttgcagtgagccgagatcgcgccactgcactctggcctgggtgacagagcgagactcagtcacaaaaaaaaaaaaaaaaaattctacttatttatttttaacttttattttgggttcaggcatacatgtgcaggtttgttatataggtaaacttgtgtcatgagggtttgttgtatagattattttgtcacccaggtactaaacctagtacccagtggttattttctgtctctctcatctcaccctccaccctcaagtaggccctagtgtctgttgttcgcctgtttgcatccatgtgttctcttcatttagctcccacttttaagtgagaacattcggtgtttggttttctgttcctgtgttagtttgctaatggcctccagctccatccgtgtttctgcaaaagacattatctcatttctttttatggtggcatagttttctatagtgtatatgcaccacattttttaatccagtcttccactgatgggcatttaggttgattccatgtctatgctattgtaaatagtgctgcaatgaacatatgcatgcatgtgtctttatggtatattcctttgggtacatacacagtaatgggattgctgggccaaatagtaattctgttttagaaatgtctacttctttgtttttggagtgaacaataacaaataagtcaaatcaaacaagaatatataaaggtttgtttgtattttaattattaaaatattgaaaaaggaatacatgaattatttacaaaagcaaattgtcagtcactggaggcaggtgccaaaataaattcttctcttcagtgtaataagaagtgctctgaagcaaattggaatataatattgataatgacaataaattgtaaattcgtataactttgtaaaaatttaatatttgtgcatttctgaagttctttgaaccttcttttttatcagcagtgtttctaggtagtgttcatttcttcagacagaaggttcttaaagagtcatgactgccttattagttatgtttgtgcttccaaaacttacagtccattccatctgtggtgagccacttcagcaaaatatattttggaccatgaattattgggcataatgtaacaaagcaactggttgtttgacattttttttttgtttggtatcatgtagatagttatttttagaaccaactctaaatgacttttctccggcctttttctttttttttgagatggagtctcgctctgtcgcccaggctggagtgcagtggcacaatctcggctcactgcaacctccacctccagggttcaagcgattctcctgcctcagcctcccgagtagctgggactacaggcatgcgccaccacatccagctaatattttgtatttttagtagagatggggtttcaccgtgatagccaggatggtctcgatctcctgacctcgtgatctgcccccttggcctcccaaagtgttgggattacaggcatgagtcaccgcgctggccttctccagcattcaacaagtgtcatgctatagtcgacgtgtcagaaatatccagtgagaatcagggaaacctcattagaaagagttcctgattggttcccatatgttcctgagctgtttactatattagagtatggtttcagtttctcttatttctttcactaatctttgggctctaacaaggtatattctcattataatctctctgttctctcaaaatctaacacagtactaagtacaaagttagttctctctatattgtagttaaatggaatgagttcattacaagaagattagggctgaattagcccagtttggcattttacatatttgaataatcaaatggtagctagaacctctattttgcttggttttattaattcagtgggggacacctgccggatttaatttctccctcatttctaatggactaagtcagtttaggtcactgtgaagacgtgggtgaggtcatgaacttcagtctagggctgctgttttattgtttagactatcgcagccctcctaagccaaatttcttatatactttcaaaataaaaatgcagcaaactagtgtggaagtagcctccagagcgttctgcccctcaccacccccggcccctccaaagttagacttaatcttcttgtttccatgtcaaatccaaactggaccaccatcactagtttcctaggaaaccctgaaaaactgtctttacataactcactttgcccactattggaatgctgccacttctggggaaaggcacagcagctgttcagctgcctcatagcaacacttcacaacagtgtgggaggaaagcaaagaccagcaatatacttaaattaaacttccctggggagagcaagataccagggcagaaggtaatagtttagagtcgagagcatctaattagtcaacaaacctgccctgaaagcgaacgtagtgaatttttaatgaaatcaagagacccagtgttttttctcatcttccacttgaaaggcactgatacatatttaactgctatcatcgaaagagtccttctgtttcaaacatacttccaaagaagtattttttttatttttattttgaactaaacaacaaaaaagaacacccacagcaaagaataaaggtcaactgggttatgttttcatataattcctactatttccccaaaagttaataacatttcatccagctaccccttggactagctaggactagctagaattgccaaaactcagatgacaatgcaagaagcatcgtttcaacctggctctgttctctctttagcacggaaacaaaacacatgtttatagcagccattctttgaaccgtgattcataaaataggggtagaaattaaagaggtaaagtcaaagttgccaatagtaagaggaaaatatttgaacggatggaacccaaactgccatgtaatgctgtgcagtttgctgtgcataaaggcactcagccaacgaagcaaatggaagcttaaaatgcagtttgggctcccctaaccaaactgtgcacccaggagtcaggctactacttcccgaagaaggggtacctttttctcagcacaaaggcgccatctgttggccatctcaacagaggggctgctttctttcggcgggttgtggtcattcagaggggaagccaatttttctagtggaaaccccgcatagaatgggggaccctaagaggcattcttgtacaaatacttcattttatacataagagaacaaacaccaggggtccagtagagaacaaaaataaggacctctgtttcagaaagcagaaaaagatgttattaaaagtactaacagaaacttttttctctctccatgaattctctgaaatagtcatggtgtctttatttgctccatgttattgatttagtgtaattctaagcaaagacaattttaaaatgtaattattagcattaatttcccttttcatctttatgtcgtgaaatgtcagcttttaatatgaatgtaaatgcattttgttggttacacggagtcactgatgctatccacttcctattttgtaggtcgtacacgcctacccatttccttcttatcagaagagtgaaaacactgcagaaaaccacctcttctgtttgtattttacttccggaaacatatacatcccatcaaccctctctatcttcagtttactagtgaataaagaaggacttaaaggtaaagagaccatggctactcctatattccaatgttgtcttcatttccagcctaagtggctggctggcacatggagggaagtaacaggagttagaatggctatcataggttccttgttcctctatgtttcccagaaggccattgtcttatttctccaccggaaagcaacttcaggtttgaatggaatatgtggactctagggatgtcagagtccctgctcactcccttgggaatggtacatgcttacctgtactcttgagtctttctagaccctcaggcattgtgagtctactagaattttgtgtcatgcagcattgcaaatgctataagacaatggggaagtacggaactacagggaacattcaaagtgtgcatatctcctctgctcacacataggcaccattgtcccattagactttacttacagaacacaagttgaaggattaaattatcaagaatttcaagacagtaacatgagagcattaaactagacacagggcccttctgaggactgagcacaggttgccagcccacaaaactggacatgagaaatattaagtgatttgcctaataaccagagataaatgcctttcaacttcagctcatttctaagcattaacttctatttacttttttttttagctaataaactgacctttctaacaattcttcagtgttactattagatcaatgaataatggaatgcaaatgtttgggagggaaggatgctaacagtgatcgaatgctcatggtgctttgccgtgcttacctaaatgatcttattcattacaattctaatgaggcaaggtgtgtttaatgcatttttaaagctggatacttaaaaccttaagaaagcaagtaactcatccaatgtcaagtaacttatgtgttgagaaagcaagatcaatgagttataaacacacggaacttgagttccgttcccaacctccctttcaaaatctattcagcggcgtcgctttcccatgactctagatggagagttgggcgggcccttgagtttctacctgcttggaggtattgaacagtttctcccattactttagatgacaactcagattcaacttggaagctgaagtgtgcaggtatctgtaacattcacatgtctggattgacttaatgttaaattttcttcccttccctagctgggctgttgaaattggccacaccattgccaacagtgacacagcacttcctctttcctgcttgagtcttcctccagttattagtttgaatgggagtggttagtacttagaaagtggggtgtggagcatgaaatatgggagtggggatgagaaatttcttattggggtgagttttgtgccaactcagacttctcttaatctcaaggattctgttttaacctgggttctcacaatgcagaacctgcataatttattgggaactgtaaccctgaaagtgagggacaggggtagtgaaacaaggcaggttcaaaataaggatgtttcaagatggtcaatgtcaggatatctggatgttcactcctatgggatcttctggaaagctgagtggcatgagctttaggatcaggccttcagcagaggaaggagaagttttgcttgctggtttctatgcatatttatccagagttcatcccatgagacattagccctcttagagttccaggatgaaaaagagtgatcacaaaattttctgccatgtcacagaaaagcccagggatgggccacaggaatgctggatgggcttgatgtatggtggtgccaagatgcacctgcaggaagccatttggggtccatgcacaggcccatcactgaagctgtggccaaaatcagagaacaaaggggtttagtggatctgatatgatgcatgaacaatgtctaacatgggtgctttcctgggttcactggaggagattcaacttgggccctccaactcaaattctaggtgtgtgccctgcctcctcttcagacatttgccttctgaaagcctggcccttgggaggctcactttatagcacatatcacctctcatatattggagtcccattttcctcatcctgatagtccttttgagcaggacttcaatagctccagtccagttcactctgcaacaaaagtctgcattgggtcctagaaaaacagtgacatattccttggcctatcatggaagggaagtacagttactcctgaaataaacaagaaactcacccctgttccaccagccaaagcagcttctataactttctatttttcccttaagttttccttggctgaaagtcagaccgcaatgcaccatattgtcaaatgagaggacaaagcattcacaattaagtctcactttaaagcctctcttcttttcagtaaaaatcgctttgtttggtgattgactttatgatgataaacatacctgaaaaagtctgatggagagtaagaaatacagcttttctaaacagaaataaggctttcagggaatgttctacaggactatgagttccttaaaacactgcaattcatttctccctataggctggctaaatttactgtcctctcagtgtgagaactagtcttctcagactccttgaaaaatgttccaatctttactgttttttagaaagtacttggatacgactagaaaatacccatcctttttaagaatttttaaaattcttaaattgaaaacacctccattaattttagtaatgcagaacacaagatagaactgagggttgtgtttctattcttactgtagtgtctagcaaagttatataaaattatgcataatatatagtgattatctgaaaaaaataatttgaaataagcccaacatttctctgccttttcttgattaagaaaatttggaggtcaactaaaaagcacacacttattaagactttaactgaaatattgctctgtggatcaggaaaaaagaaattccaagaaactcaaaaattcagagcatgaaaatatactgatcttagtgaagactgtattagaatcagaaacagatgacaagggaagggaggagaaagtgggaaccaacaattcagcatgagaatagaactgtgtctatagtcattctgtgaattattaagttttcacctttggaaagatgtcttcgcaaggctagtagttttaagtacaaatggggataatgccaaatgatggttttgcataaaaagactggtatagcttagaacatgcagttctgaataatattggagtaggaaagcaagtcaacaagctattgtgtgtgtatgtaatggacttaattagaaaacatggatttggaagaagtttacttcttccagatcattcttggggctattaatacgaaaactgaaagtcattagtgaccagcgttgcctcaaatcttaccaggtcaaccccagctgttctgttatttcatgagaaaaacatcaactgtttaatcattttatttgtattaataattttattactttaatcatgatgaagaattctctaaatgatccttttgccaaagatcatgttcaccttcaagcctaaactgcctacgaattagatgtgctgttttcccagaaacaatgttttcattactattaataagtagttacttttattaatcccagacaaatgacagtttaaaagacatcatcagaggatatttaagattttgttttgccttgttttatttattcactccaatgctaatgatctggaggaaaacattgtttcattgttttattccttcaacggtattatattatttaagcaacaaccgcagcaaaatcctcaggttttggaagaggcccattagctagcggcactaaagtgggaagaagtaattaaaattaataactcaatgcagaggattcctgcttctgaaaacgattagcatctctttcctgttcgtactttttcttctttgtgtgtgtggatagaaacacgatcatgcttgttgcccagactggggtacaatgacacgatcatagcttactacagcctcaacctcccaggctcaagcgatcctctcacctcaacctctaaagtagctgataccacagataaatgccaccatgcccggctatttatttttatattttatagagatggggttttaccacgttgcccagggtggtctcaaactcctgggctcaagcaatcctgccttggcctcccaaagtgttgggattacaggcatgagccaccccgctcagcctgtccttttctttacagtgaatttaagttttaaaagttgtgctaaatttatttgaacattacatcctgcaggacatgttaggatgcaccgtataagccatgaacgttctaatactgcagggattcagtgaactttccatttccatacaaacaacctcctatcttctgtgccttccttgaggttcccctaaggtgccctcttctaacaggaggggtaaagccacagtcagcctgctaacagctacacagcaatcaggaaagtgagaaaattaaactaccagtgacacatgttccgtctcacccgtttttggagaattgatggagtgtggtagttcaccttgtacctcttcacctttacagcacaacttgaatgggtctggcccattgctggacagttggaggctcaacttcatacattatgctattactctctgtggaacaggaaatttcttgttgcttttaaaactatctgtttgcttccctccatatagatgggagaatatggcttaatctgccactgggaaagcattacatcatggtagggctcagggaatttgagagccaattaaagggtgtttttttctctttaagattaaaattttaatattgaacattactatttttctaagaaaaacaactataacttctagaatattcaacacttttaattataattaatgtcctatttatctcatgcattgttaaatctgcaatttacatatttaataaaagcaacattattaggtatccattaaaatctataaaatgcaagtttccattattgagtaaattaatttctcagtgagtggctgtttctcttctcccaaccactgatgaagcaacattattcatcagtttaattttactagttgataatacattgctgcaaacattaattttctaatgcatccctgtacttactttgtgtgtatgtttgagctggttaagaggccctgacgattgttttaaccattgacagactgcaagatgagctaaacttcagctttcaacgaagatagactgagtctgcttgtattgagatatctgactttccttaattacaagacttttccaactgcttcctaaaacgttggcatagcattagtgaaatctctttttttttttttttttttttttgagacggagtctcgttctgtcgcccaggcgggagtgcagtggcgcgatctccgctcactgcaagctccgccttccgggttcacgccattctcctgcctcagcctcccgagtagctgggactacaggcgcccgccactgcgcccggctaattttttgtatttttagtagagacggggtttcaccgtggtctcgatctcctgacctcgtgatccacccgcctcggcctcccaaagtgctgggattacaggcgtgagccaccgcgcccggccgtgaaatctctttttaattgtttcaagtaaagacatttgtcattgtctctgtaccatattgtgcttcttctacagactcttaaaattcatgtatgtcaatcttattgctcagaatcacaaaagtaaagattcaagctccttgatatctgtctaatatataaattctttctttcacttatccatgttctggagactttgagagtcatctagtccaaaaataagaaggcaaaattcagaatctctggaaaatggtgcccccaggtttctaaatgactactgactgtgtccaaaatctgctacagttaaaacaagccattcatctctgaatctttattttaaaatcccatacctattgtataaaatgcttggttatcaaatttgttagttatatgtttatttgcaagagagttcttcccaacttcaccgtgtccaagtagaattgcttttaaaagtgttatctttctcagctctgctgatcacaagctatttgacgtcagatctcttgacttcagtttaggcatcatcattaccccctgacctcctgcagctctgaggaagacacaggacattctctagcttggtccatcttgatgagactactgaatgtaaaagggttgggattgggacagagagggcaagtccatttcaaagttttgattgaggaaaaatcttttggttggatcgtaattttacctttcaaaaacagacaatagtaaaaagataggactatggaagagaacatacacacacatgcacacagacacacacacacacacacacacacacacacacacacacacacacacacacagagctatggaggcagaattgcctagcaggaataatggtagttttgaaattaaattatataaagacctgggtttaaatgctaagctcaaaattatatcaagtgattttaggtaagatagctaacatttcttagcttcagtttccccttggaaaaccatagatattaactatctatggaactgattcctggttcatagcagccatgcatcaaatggtacctactagagttctaggaaagaaaacaaagagttgagaaagtgattataccttgaattttagtcaaagcagagtgaaaaggttagctagagttttcctctgtgtaatatactgagaacaggattcatgtgttagtaatttattctacactaataggtactgattattcagggaaaaaaacatgaaatataatacatatgtgtgtatatactgcatatatatatatatataaaaaatacttattatgtaatatgcgtgcacatggcgagcacgatactcccctgccatcttgtggtagcacagctatattatattttcaagtgtaatgaattttattctaatgccatgggttcatggcaaataaataaaacaaattaatttaaaaacacacacacacacggagagaaagagagagaagagttttttttatcagcatacacatttttcaacaactttgatgattttgttttgcaaataaatggatgcaattttatttttgcaggaagaaactcattaattgattatttccaccttttattgagtgctttccatgtatgggcctgtgtcaggtcctggaggcacatggcttaataagaatatattgtttgtcctcaaggtagaactgatgatgaatgctattacaatgttggagccatgactgagagatgctctagaaatcctttggctgaaccacctagctcagagtggtgcattgagagatacttacaaaaaaagaaaacactatggttgcgtattaaaagggtggtagaaattagtcaaatagagtaaaactttggggagtagagtggtagaagaagtggaatcaaggcagagggaatatgatgattgagataaggagtaaaaatttcatttcaattcctaatgtactcaccactgatttgccaggtatcctgctaggtgctgggatgccagagtagacaaggcagatattgtccctggctctcttcaggatctttttttcctcttccccttctcaaaatctatgaactaaaagggaagggtttctattcttgggcacacctgttttattctttgtttcttgactatcatcaggttttttacagcaagtatgctctgttaatgaatatttttgactatgttgtaacatgaaagttgcatttcacaagggaagtgatacaaatgtgaggaacttaatgaaaagaagtagtagatcatgctaaaacaaagggatttgccctgatattgaaggttggaaaagtcaaacgtgaccgccatgacaaagtggcatttaatataaagaatgaagtaagaatgagacttaaccaggtagggggaaagattaatggctgagagaaagaacttttgctgcactgggaacagtgtgaagcccagcaccaggcaccatcttttcctctgaaaaacagaagggagttttatgtagatagacagtaaagtagagtagttattaaatgaggccagggccactatccaagatattaacaatctaatcctggaaactgtgaatacactacatgacaaaagataattgaggatgcagatggaataagattgctaatcctctgactacaatggggaaatgaccctggactgtcgaggtgggttcagtgaaaccacttgaggtcttagaagtaggaaagggagggagaagaacgagtcagaggaatgaattagaagagggaggagagattccacaaatgacagagaactggcccatgactgttgactttaaagacaaatgctgcggtcaagggccaaagaatccaggtggtctctgaaagctagaaaagacaagaaagtgaattatcctatggagcttatagaaaagaatgctgccctgtagacaccttgatgtttaccacagtgagactcctgttgggcttctggcttcaagaactataagataatacatttttgctgttttagaccagtaaatttgtggtcatttgttatgacagcaacagaaaattactacattagatgtattgtcagtggtagattagggaagccctctaagctacgttaaggattttattccttatgatcaagcggtcactattccatagctcaggaaggaaaatggcatgtttgcgtatgcaaagatcacaccaactggtttcactgagactcaatgggtgggagcaatagtggacccaggggaacctgggaaaggggctgttgcagttgtttgctaatatgtggtagtgatggcagactggggaaaaaaacagacttattcatttcagagatacttaggtgggaaaactgatgatgtttcctacttgatggatggaaatggtaagacaaagttgggacttaataccaaaaatgtgagttttattgtgcaaattaaaaaatgaattttaagaaaagaaaatcagagattggctcgttagatatattgttccattacataatgatgtcagtgagccttggaatagcagtcaaaaatattcagtaacagaacatacattgcttccaagacctgatgatagtcaagagacaaagaatagaacaggtgtgtcaaagaaaagaaacccttcccttatttttcagattttaaaagggggggaagagaaagcacaagatcctgaagacagccaaaaaataaagaaaagagaggctatgtcataaaagagggaggaggggtgacttcattgaataaatcgtttttaaatctctatttctcagaaatggggctaaatagtggggattaaatgttaccaagagcaagacaccttgcccttagattctatttggaaggaagacaagcaagtaactgggtaattttcaaatggtccagtagacatatgttgtcttgcgcgatgctcctactgatgttgaatacctttccatatgctattggctagtcagaatccctctgacatatcctgctcccattttctattattgtttattaccattatactaatttataagagcttgttgtatattcatatactattcatttgtctattaaatgttttgcaaatattttcttcaattttaatttttccatgctaacattgtttacagtattttttcttttttttcttcatgtatccaaatctgacttaaactttaaaaactttataatcaggatagttttactttatgtctttgatattttggttttttcttaggaagtccttacttgtctttatttatatatatattttagacagagttttgctcttatcgctcaggctggagtacgatggcacaatcttggctcaccacaacctccgcctcccaggttcaagtgattctcctgcctcggcctcctgagtacctgggattacaggcatgcaccgccacactccgctaattttgtatttttagtagaggcagggttttttcatgttggtcaggctggtcttgaactccccacctcaggtgatccgccctcctcagcttcccaaagtgctgggattacatgcgtgagtcaccgtgcctggccaatatattcttataaatatattcatctatagttttttattgatatctggtacttgtacatatttatgggatacatgtgatattttgatagatgaatacaatgtgtaatgatcaaattggggtcataattttagcatctctattgatgtttaattaacataaagtgcacatatttattatgtacaatttgataagttttaaaatagatatctacctgtaaaaccatcatcacaatcaagaagataaacatatctatcaccacaaaagttttctcaggcttctttgtaatctcttccaccaccctccacacttgtctacagagaagtgtcaatctttttctgtcactaaaagttagtttgcatttctggaaacttatataaatagaagcatgcaatatgcacccttttatgtcttttactaagcacaactaaactactgagatttatctgtcttgttgcgtgtatcaatacctcattccttttcattgtttagtagtatttcatcatatagctatagcacaaactttttttacccagacttgttttgaacagttgtgttgtttccactttttgccattgcaaataaagctgctgtaagcatttgtgtatgggcctgggtataaacatgcttttagttttctctgttaactatctagaagtggagtggctggaccatatgaaaggaatatgtttaactgtttaataaactgccaaattgttttccaaagcaattgtagcattttacattctgaccagcattttatgagggtcccggtttctccatgtcctttccattatttattatgatcagtcttttccattgtagcaagtgtaatgcatgtgtagtggtatcccattgcagttttagtttgcacttctctaatgactaacagcgttaagtgtcttttcccccctaggtttatctgccattgtgtatctcttttttggttaagtatgtattcagatcttttccccattcttaattacgttatttgtagaatctgtttcaagactgatggccattgtagtcagtgatcatgtttctgaaaatcaatcagggaagtcacctatttttcaaagtcagatggtgagcaaaagccttactccatgaacacatttctgaaagctggccaatcaacaataaacttacctgagcagggtgtagtgcctcacacctgtagtctcagctacttgggaggctgaggcaggaggatctcttgagcccaggaacttgaggctgcagtgagctacgatcacatcactgcactccatctgggcaacatagcaagaccctgtttctgaaaaaacaacaaatagcttacctgaataagcacatttccactgctgagatccaccaactcctgactttgaaagtcggccggtccctggctctacctcttccaaatcctcatacaaaataagcttcctgctttgcaatcagggaaatggtgcctaaaaaacatagttctctcttatttaagtaataaattcagatttttttctaggtgttgagtggtatcctctcccctcaaaaccatgtagtttatcaaaaacttctttttatgtaggttttgtggtttagaaaaagtctgttacttcttttctgaaagaaatgaatttttttatccatgtgtattgatgagttcatcctttcttcccttatttaaatatctcctttatcataaactaaattactagataatcttaattttatccaaaacacttagtcataattttctttgcatttccatctttttttcctacaaacgccaagtgctagttaccaaatggttctacttttctgacagcagaatctctttacacatcttgtataactcaaaaatcgagttatgtgatatagttagaggtagtcagtttatttagtcttacatctgaatatttcaagtttatctatttgatcataaaacaggtttttttaaatactcttgggctttctcatgaaaagtagtgacagaacaaatgcattgaaaagaagaaagataatggtatagacaggtgttttctttcatgttcaatcaaaaggtttttattttcaactcagaatctgtgaagcttcatgagatcagggctgttgtatttttctttctacatgcctggcaactggagcaatgccttccacgtggtgtatattaactatttatgggatgaatgatgaaattaatgaatgagtgaaataaataattttgtctttctgtgtatatttatgctaagcatataacagggtaaaattaagaggcgttattcttatttacaagtaattacaaaagggtgggttggacaacttagtttttgtgagttaaatataaaagtaacaatgtattctcactaggtgagaaatcataatttgccagacaaatggtgtagactctgaatacttggaaaggtataagtcactggggactaaagagattgagtctccctaaatacaggcctacatttggacactgaaatgatgttgatatatatattttaacatgtcattctgtcttttaatctccttatatgtaatacttgtttccttcttcctcccattcacctttttctttaagtagcagtttggtcacttagcgcttgactcattcaagccgttgaatgacagcaccatgttagagatgcccaaaggtcaaccagaaagaaacaaagacgattttgttcctagatttatagttttaaatgaactcagcatagttttagtctatattctcaaacattgtcatttccccaatattcttaaaatctttcaaaccttgaaagtcggcacataagaatataatgattgtctcatacctacacatagcgtattcactttcttgttgatcatgttattgttctattactatcaaaataatcattgtggaaaggtatgaaaatctgacacactgaaacaaatgaaccagaagagattaagaagacatcatagaaagtgcaatgtgctaacttggactggatcctggaacagaaaagtggaaaactggtggaaaaactggtgaaatacaaatgaggtctgaaagtagtcaatagaaatatttaatagtaatgtaaccaaagtcaagttcttagctttgacaaatgttccacagtcatgtaagctattagcataagtggaagctggattatacttatacgtgaactctgttttatttctgcaactttcctgtaaatataaaattattctaaaaataaaacgcttattaaaaactaaatataaatatatttttcagtaagtatactgaagtgatttctaaattaattatattattattacatcaaaaatgagacttttactcatcttgttttgtttactgcgggtagcacatggaaaatgctcaagtcactgaattatagagcaccaatgaataattttctttagttttcaatatgagaagagtgtattctccacttcagccaccaggtggaagtatcagcacatcagttaaaatcagttcttcattgggaggtttaaaaactacccttggaaaacaaacagtttttaatgttatgatatgatgttattatacacagtaagaggaagaattcccagtattatgatgaaaatcaagaaagatataaattggctgtggacaggactccaggatactgagatatccagaaataaagtgaaaaaaaattttaccatttatttaaacatttccagacatggatataagtgcacatggataaaagttgaacaggtagcaacatctggagacttaacggacatttatcttagcccagacataagtgtagcatgcaatgtctgaaactaccaaggcatggaaagctaaactgatcagtatgatgctgtcagtgctttcagtatgggtgatattcaaagtacaggagaaccatttagactaaatgctaccatttaatggcccaatctgcattctccctgctaccatcttgatgacactttctaccattcaggaaatgaaagcactttctagtgtcacccagtgcaatatctaattaggaaggcaaattataaaaataaaaatggaactgcagtgtctttctatccaaaaacgaggcttgctttgtagtttctaatccatcagtttctttccttactttgaataatcaggcatttgttatgtctaattttatgtcaatcacattctcaactctctgtataaactctttcaataaagattgatacaggtatgagaagaaccagaattttttcaaaaatattatattagacacaatttaatataaggtgaaatctattgattcagtcacagtttgatctgttattttcacataccacattctgtaagatgctcacaggctactgaaataaataatgatttgcctttttccattttctgagttatacaagtttttagagatgtgtcttgtgtaaagtgcatcattgcctgcttttcaattaaaaagacttttgaggcctgagaaattagaccaaaaaaggattaatcataataatcttttaaatagagaacacctgccatcaatattttagaaagtatcattctaaaactaaaacttctattactaagagattataataacaggcaaccctacttatttctaagaatagggtctacatgtttttacttattggtccacatattctctgcaattaaaacttagacaacatttgagtaatgttgtccatgttgactgatgaccacagacacagtgatgatataaatcttaaacagattcatttgatttcctcatcagtgatgaactacaacattctccttcatgatttcttttcttatgtccatacctatccatttaatcttaattctggttatttggaacaaaaattccaataagtggcatttttccagggctcacatctaatagatcaagacctctagtgctttgatgcttaggtgtggaaagagctctttaccaggaatgccgggcactctgaattagtcctgtctgctcagaagaacattgcctctccttaccaattttctaattataacgaacatacacaattgttaaaaattcttgccagcctttggacaattacaaaacagcatttttcatcaaaggacacctggagtatgacttataggcacttacaatccagaaagataaggtaatcaaactctggaagaattctgccagccgggaccctttaggtagaaggcagtgaggtagacttccgtggatctaccagggcaacaaaagagaagaggcagagcccttctgagctattcagcagggagaagactgagatgctgaaaatgtggctaaagacacagtagtactgtgagtcctcaatataacccatatttttttccaacttgtgttaatctaatacatcttttgaatataaaggaagaaagtgtaaaatgcagttggtgatttggttgttctatttttgctctcttttcctttatacaacagaaaattttggttattcaatattgtacttaaaggcataaggcatgtgtgtatgtatatatacacacataaatatgtattatatatttacatattacatgtattataatatatacatattatatattatatatacatattatattttaatatgtaaaatattctgtcatttgtatttacaaatatgtcaagtttgttttaggataggcaaaatactctaataagtaaaaatttcaccttttactagtagttttgatgctatatccttggaatttcagggttttcatagaaaatgttttttaaagaaaagaaaaaaatggtagaaatttcattgtcttattttttaaggaccattgcttaattacttttttctcagttctgtttatttgctcttaaaacaaaagaaacaacaaaaactgatggctttctcggacaacaacaacatccacaacaacaaaaaaaacactaatcagtttctgaaaaactaaagagtaactgattattctaactattaactacccgaccattcaggtcattgttcttttctacagtgtgtgtttatctcatgctcatatattggttttttaagtgcagtatactatacttaatcattgtctaagattctttggaaatctgtttttctattcaatttatactcctagtagaaaattttttggggaacaaaaaactgaaccatcataaggctaaatgaaactccttggaagtaaattgttatttgaggtatctaaatcagaaatttctgttcttcagttttatgtgtctggggtattgctgtaaagcactgaccatttctttgctggaacatagtttatacataatggagaaggaataggccaaggagagatgatgatgaatgtatgctttcccctgcagaaatccctttcaaaaagagtaatactaacaaaaacaaaggcaagttgaaaatgtggtggacctcaccctcagaccaggtgagccttcagattctgcacctcgctggccgtgcataaagaaggctgggacatccctgaattcacagtcagggtggtcgtctgtgtgcagaactgaaagcaaacaagagtaagctatagccagatgtgggggctttcaggttcactgacggttcctggggtacttggagtcaaagcagctcacgcacgttcctgctttccaccaggaaacgtggagccacggaggccaaggaaatctgatcagctccagatccccaagttggtctttttacacccctaaagacaccatgcttgctccttctccaagactcataaggaaatacaaatgactttgaaatatcagccactgttaactggatcagattcctccagtaaatatggtaagccaacagatctaccttatggctcaagatccagcaaagcatctcataaaagaatatttctatgccctcatccatacatgtgtttctagagatatgttatcagtcctttctaccaagtagacagaatttttatcattacatctttgaaatcatagaaaatccttcttctcagcggcatctagttttacttaatcctgctcttcaccaaattctcagttccaaaattttgatttttttactgacttctgtcatttccttcttttgatttgactttctttgtcctgaacctcaaatcccacctgatacacaaaaactatgaatttaaaagagcatattcattgccatagttttgtgaagttaaatcaactttgcatatgaattggcataggaagatcacattcccttccatacgaatttagagaaggtatgaaagtcagctctgttagtttcagagtgtttggttcaacctttgtgtgctcagtgttcgggggtaaagggtcatctgtctcttctatgtttttttctaagttggccgagtaatttcatctttaggtctccatttctaaaattacatcctgggtttgataagattaaaagatgaagtgattaattatggatttatttaacaattgactgatttttacaaatagttcacttttaagtggctttgaacttatctttgagcaccaaaaactttattggtgttctatatgtactgggcaaatgaaaccaaacttcattttacccctattgaaagtctgtttactgaagtcactaaatcaccccatttctgacctcagctaggggttcaaactctttttcacagccattaactttttcagcgtttcaccaagcagatgtgtgttgtgtggcttaatcttttccatactagatgatacagcaggcctccacctgacgtgcgctttgatgcagcataaaaatctcattcatcatatctgatttgtcctctttgttgacatatgattaatgtaaaatggtttttgttttttttttcagagagaagagtcatgacttttgctcagtcattaaaataagagacacaaggattggtatggggtatccctagcagaatttattcaaggaagcctaatcaatatcccccatctcactatttcttcagacacgtgctaagtttacatattcgaatcaaattaacatatcagagtcacaaattggcaatggtgtcaaaatacctatcctcaccattctaaatcatttttcacattaaatatgtcaagggctatgtttgcgtgcataagtcaaaagaagagaaataaagcaatacattaagaagttggtgacataagcttatttatttagttatttatttttgcctattactggtagagaaaaatgtatttagtttgctctattacaggtagagaaaaattatattttgttgttctgagtgaaaccagtgataatcattttacctcttcttttaagtagtatagaagtctaacattttcattgcttattgccagaacttaagtgctaagattttttctatattgtctgatttgattcatacatataatgttgagattcaagaattattatcccatttaccagatgaggaagtggaggtacagaagttttagaaaagggaattagcctccgcttctattctattaagccactatatttcagaaggcatagagtatctattttgcatttgggttgggggagatggagatttgccctaactttgattcttttaggtcaagaataatttctttcagaacccggatggttttcttatttccataaaatgggttgccacattaggcctcagagtccaccaaatgaacggttcttctcttctgctgtccctcaaatttgtgatatgtaaaatatgtgtgaagatgcagataacatgtgggatctcattggctctaccattccttagagaaaatgtaattgttattgattctaactgatcattcaaaaattaagttcctccaaatttactctttttctaattgaaggttccagctgccatgggattgagatttcctatttttttttttcttgtcccgaaactctctgtcaaagattttatttctctaggcaaccagctggtttttcacatagataaggtcaattaatttgacctttggttcaatatgaaatgcataataaaagctggtgccccaaggaccggatgtggcctttcaaaaaagtaacttgccaggacagggaacaataatttattacctcataaaccccagttgaaatgcctgttgcccagcatagcaatgacaaggagcttgtgtgtctttatttatttatttttattctatgcaatagagagaggggaggaaaataaaaaaataaataaataaaacaagcacctgccccattcagggaggaaaaatggcaaaggcaaaaaagatctactcgtactgcttgaatttttgttttatagcaagttttcatccactacacaaaaattcttagagacaggctcgggaaagtttattatcaactataaaattttgttaaattgtatttcatcgcttgaattttgagagatacaggaaatctttgtgaagcgatttgaaatagagaaccaaaattgctatgtatagtcaacatccaaaatgactactaatcaggataaatttatctatggatctgtttggtggatatatttatatatctaattttaacaaattcatgaggctgtgaactcttatatttcagtttttacttaattctgtatcgctatcattctgtatgccattagcatccttcatatgtggtatttattcctttgcataaatgtgttataactggcgtttgtgtctagttttatctgatattttaaacaaccctgaatgaaactcctttacataagtcattgatcacatccttgattatgtcttagaaatgggcgatctcaacaaaacatacaaatatcttaaagctattgaaaactattctctcagtataattcaccatttctagccaccatgtagtttttaatccattccttcagctgttcctttgaaatagtacttttagtatacgtggaattatggataaaacagactgtagaaaatatttaaacctcaaaatgtagacacgtgcctaaaacgaatcttagctctgtgaatgcccttcattggggaatttttacagataatgagatgcaagttttggaactccagtgggagttttgaataaggggcaatttctgagtaatggtgtaatggagtcatagtaatggtgcaatagagtaatggtgtaataccccacagtgtggggtacaagagaagctttgagaatctagaatgcaccaggtccttttaggtaggagacaaaaaatgcagccaaagtggggaaggggtggaaaggaaaataaaatagtcctggaaacaaacaaacctattacaaaatttttacacagctacttgtgtgaccttctggtgagaatgcaacttagaatcactttcctagagagctacttgggaatatctatctaaaggcttaaataacagatactctgtctaagcaaatacaatttgaagtcttcatacccagaaaatcatcatcgatatcccaaacaactattgtaacagaatttaacttttacaaataaaaaattaaataaaatttgtttcatctttccaaaattttttatatgcaaatagtgagaaagagagagggaggggcaaacaatttataccaggtattttgtttgcaactggcttctttttattcatttaccaatatattaatggtggttattgctggtttctaattttatggtgatactaaattttcttattttttcaaacttcaaaacacaaagacaaaaagccatcaacaaatgctattttgctatatctatagatgattcagtactgcatatcaaaatgggaaaaatttcttttcccatattctttcattcagtggttccccatactcacttgtaaccgcaaactggatgtacggttaatgccatttgtgctctatttcaaagacattattagttaaatagccttctttttaagtatcttaagaacctagccacaatttatattattgttttcatgggaaaaacatgttccaagtttcaaacagctagtgtaaaaacaaatccaaaacagtttgcatgtatgttgaagaccgtctattcagttttttgtttgtttgtttttactcctgaaagctagttggtgtcttgaagtcatgaattgcctgagagtacaatatacccagtgccggaaattgtggcctgacctttagttaagaaagacttccttctagatctctgtcttacagagaccattctttccatgagaatttctttattatttttgaagttatcaattgaaatcacaatttactgatttgtgtgtgaagtaagtctgacacaaaacagggaatcatatttaagactactaagttatccccttctcattactttttttttgtttgattgtagaaaaacctctatagagccatatctctctaatacttgtattatatttatctccagagatctagcttgctcaaaaggagactattatctgactgcctgaatagatcccattacaggaaaaattgactgaaatattgtcaaatgtgttccagcaataaaattcaggtaataagttgaatttctagctttctgtgtccagatttcccctatatgattctaaacaatagttggggcaggtcaagaaaaagaggttaagagacatgatggtaaagaaagaccaggaagaggatgaaaactttgtgagtctcaggaacataaaactgccagttgtttgcagcaaaattctcacgaccccaaagctgaactttgtaaacaggcttggcatcaaactcttgcctggagaaaataaggaagaaaagaaagaaaaaaaagagaagacccttgccctgcatacagacacacacacacacacacacacacacacacacgcacacatatggcatgtgtgcactgcttaaatttgtaaggacatatacaactggcccgtttctaaataagtcttttaatatcctgagcagtttgtattaggctgagtgatagaattatttgtattggccaattatttccaactctgtttcctggagaggttatttctaatttttttagtattataaagttcctaatatgtgaggaggaggtatgatatatgatgaaaaccatgaatttaagtgttgattgggtctgagtttcaactcaactaacttactcgatttaaagttatttgattttttttttgttttgccctttaaaactgtgaaaatcatagcatgtatctcttttaattattgtgagaattgaaagacatgcacactaactgatcacacttatttagaaagcttagattaatgcctgaccacagtgagtctacaataaatattggatataattattcttgccattgttattagaagaaattgttaattgaatcagagacctggaatgaaataatccccagatataggcatcttaaccttagcaatctctttttgagtacaaaaagggagcttattttaatgtataacaggaaacatccacacttccctcatatgcctccatagttaggaatttgaacctatttctttattacaataatggaaattttcatcaaatgggctagaactaattttcaaacatggttgctatgacatctttcatagtttttatcacattataagtaaatgtgttttactcatggtcatgcctagcaataaagaaataatagcactcaatgcaaatggatggcttaaaaattggacattagatgtgaaccagggcctgacttttcatataaaaggttttatgtattttaaatgtgactcagtaatttctatttgaatgctgaatgtgtctgtctctatttttcatagacatgatgggtaaattccacagtaataaatatcttgaaaatttctgtctaataaaattaatgttatccagtaacccacttgattataatatattttctacaattgatattatatagtcctttgacatttgttgatattggctgtgatatttattaaggttatctttaataatttcatttatgagattcaaaccttcatcactttattttctcagatgacctgataaatctcttatgtctatcattttctaataatattttctatcctacaaaataactttcttccagtcttacgcttttcgatacctggtgtatttgtaagtgttgcttaatattttcccccctctctcatctcttgagacttactttaagtttttcttttcagttactttatttttttcaactctctaaatgccattattaatattttctgggttttaggttcattatatgttagatttcaaaattagaccacaagatttatgtgcctattatttcacatatattgtagtttagtcatcatgaagttatcccttgataccccagctcaactttgaccttgtgacaaaatattgttctgcctttctattcacatgggtatgtgaatttctcaccaagattctgcatcatagacttttgtgttagatttccagatacaccaacaagcctaattgaaaaaatgggaatgtgcatatttaccctccctttgtttctctcattatatgtttttgcagtttagtagataactatcctcatacttctagcttgttagatctagtagttgtggacctgtgaggtaaactcacaaaagatagattagcaaggacaaaaacagattgaattacatatgtacgtacaggtattcacatagaaatgtgtcaaaaggaaatgtctagaatttgggcctcatataccatcttaacaaaggatgataaattgtggagaagtaactatacaaaggaagggagggcactgaacttccagggcatgtaaattgtggaaatgtaagtatgaggaaaactaatggaatataagggttatttagttaagaagtgttatgtagactcaagagctttctctgttgataagaggtatctccactgacagagttgtcctcctctttctgatacaaaaaagaaagatacctttacaaatggaaatttgtgttacgtttacaaaggaaaatttatgccccgcttttagacagaaaggtggagggcagagagctttttctgtatttgctattcctaaattgcaatcagcttaaaataagccttatctcaaagcagaatattttgggctaatatacaccaatccccatctgtgtctgttctttctttctttctttcttttttctttcttttttttttttttttttttttttttgctgtctctaaacaattgagttttgaagtttggctggtactttccacatattattttttgtttttgttgttaatcttgtacttattttgtctcactggctcctgattttaaataatctgtatcgcttttcacaaatataaacagtgtaacatgtttataaaacattttcaaacatttaacgtttgtaaaatttaaaaaccacccccaattctgacatccagtgatggtccttattaacattttgatgtgttttatttttgttgcagtatgtatttctgtaagtatgtgtgtattaacaaagctcactaatactttataatcaaattctctgctggtttcatattctccattcatccacttgcaccttaaatatcagcaaactgacttgttcctggaacacgctggttcacctttacatatgcaccactgtatatagcattcctttatattatttcttcagcttagagcatcctaatcaaccccatccctaagctgaattttcattttacagtaccaaggcacccttatatttgcctttatatcaaaacacattttatatgcattataattttctttcttgtccatgtcttcagctacacacagagcttaacaatttatttttgttgttgaaatctgctgaataacaagtttttaataagtatttgttaatcaaacatatgtttcaatcattttctacctgtatcaaagtaaatgcatcaatcaacacatgtttactaacaccttgggtatacttctatgctaggtgttgtatatgctacaaagaaattaatcacaatgctgaatacagacaaatgggagaagaaagcaggtttggaatcagaagactttgctatttgttatgtgttgatgaatacatttttgtattctgcatgtttcagatgagaaaactaagattaatgcccatttcacaatatcatttagagaattttcatagttagtggtttcacaatgtgatgtcagtgtcaaatatacttgtattaaatatattttaacattaaatattttttatttaaaattaaaataatattaaaatgttagtcttaacattttaaatatttaatttaacattaaaatattattgctactattacttaattcatcaaagtggccacaatttaatgagtgtagcataaagcatttgcagttcttactgtcttgctgaaaatgcaaaatgtcaatttcagtctttgtcttaaactcataattaaaacttagaggcagttcaaccctaaatcattacaaggtgtgtgctcacactttctggaaacttggatagtgcttcttattgcattggatacctgacaaaacaaagatgttgcctacaaaaaacaacaaagttaatgagactttttaaaaatcgactataaacaaaggaaccagggctctccaaaataaaaaagtacattattttattttaaagtcttaaagtttagatagattactgaagcccaaggaactgccactccatagcttttccttcagacatattactagggtctcccatattcttaaagtgttattctacagttggcaagatctttaggttgacccttctgtgaactaggaggtctcgagtgaaatttgtatgaatcctatgagttctaaattctatttggcttacacaacgtgtaactcagcattctcacagattttagtttgcttttacttttagcatttaatcctcaaaagtttgttatatagataatgtttcagtgaacagctatttagcactattattactatcttctgcttaagattgttttcaataatgcaaaaccaaaattcaaaacccatacaaaaagagatcatcagaatgtgttcatacaattctgttatgtgagttagcattttttttgcttatttatgcaacctcaaacttttccctcatcctgtaaaattcagcattctcttgtaattcagaaattctcagtgataaagttctgctttaattagtattgaggattatttttttaaaaagggcgagagagaaagagaaggagagctgagagaataagcacaggaaattactagaataacaacatgacaactggagaggcatcacacttcaaatagacaaatagggcacaataatggatcccaaatgtttttattttttttcttaatttctgtgtttccataagaaagctagagaatagtttaagctgaagccttatcactagagccgaaaaataataaacacaaaaaactctttaagaagtaataaaatataagaaaacaatattttaaaatttaagtatgttaataaagcatttctcttttttttttttggctgttacctacttattgtttgtgatgattttactcagtaccctgtggtttcctccctggttgctttgcctgtctttcagatacttttctaaggacttccgttatttgataagtagtatcaaaattcttttttgataggttagggtctaattatatatgtagatagccagaatcaaagcagaataaatgtttatttgtttgttttatgttttgtttttttgagacagtgtctcactgtgtcacccaggctggagtgcactggtgcaatcttggctcactgcaacctccgcctcccgggctcaagccatcctaccacctcagcctcccaagtacctgggaccacaggcgcataccaccatggccggctaatttgttttgtatttttttttggagatagggtttcaccatgttgcccagattggtcttgaactcttggactcaagcgatccgtccacctgggtctcccaaagtcctgggattacaggcataagccacctcacctgactaaagaagaataaatttttaaaatgtttactttcatttgttgtttcaaatataagaaaatagtcttatgattatacaatgtagtattaataacaatttatcattgtattatttcttatacattgtaatttattgcaatcacaactttattaatataattatttatatttacgatactcatataatagtatattgatataatagtcaacatttcttgagtgtttaccatgtaccaattattataagtgaattatcaaaaattatttattttaatatttaatatcattatgagacaattactattatcccaattatagaaaaaaatgaggatcagagaggatagataacttgtccaaaatcttgtagtagtgagattataagtctagctatccctgtaaaaactatgctatgtcatatctaaaagcctatgtagcagataggacaggtatatgataatcattttgcaaatacagacacaaaaatttatgttctcattactcaacttgctcataaacactcagcaagctatctgaaaagactaaaagtgtgaggtttttttttttttttttgcttttttaaacatttatttttgattcagggggacctgggaagtttttttatataggtaaactcatgtcataggggtttgttgcatagattatttcatgccccaggtattaagcctagtacacaacagttattttttctgctcttctccatcctcctacccttcaccgtcaagtagatcccagtgtgtgttgtttccttctttgtgttcatgagttcccatcatttagtttccacttataagtgaaaacatgcagtatttgattttctattcctgtgttagtttgctaaggataatagccacgaactccatcaatgttcctgcaaaagacatgatctcattctttatggctgcatagaatttcatggtgtatatgtaccacattttatttatacaatctgcggttgatgggcatttgagttgattccatgtttttgctattgtgaaaaatgctgcagtgaacatacacatgcgtgtgtctttatggtataatgatttatattcctctgggtttatacccagtaatgggattgctgggttgaatgatagttctgcttttagcagtttgaggaatcaccatactgttttccacaatggttgaattaatttgcactcccactaacagtgtataagcattctcttttctccacaacctcaccaacatgtgttattttttgactttttaataaaagttattctgactggcgtgagatggtatctcattgtggttttgatttgtatttctctaatgatcagtgatactgagcttttcttcatatgcttggtgactgcatgtatgtctttttttgaaaaagtctgttttttaataactagtgagatttctcacttcatcacaatattttttaatttagattttctcatttaaatttcttaccactttttagacatagatgcattctttatatttcatctgttttcagatgaatattaattgacaatttggtactagatcctcctttaattttttgttcatgacttgtctgtccacagtaaaaaaaaaaagtataaatagtagcaaaatatagaaaccaatggttttcaggcattggataacaggaaattcaagtctacaattttttttttttttttgagacagagtcttgctctgtcgctcaggctggagttcagtggcgcaaccttggctcacttcatctctgcctcctgggttcaagcaattctcctgcctcagcctcccaagtagcttggattacaagtgtatgccaccatgcccggctaatttttgtatttttagtagagatggggtttcgccatgttggccaggctggtctcgatgtcctgacctcaggtgatctgcccacctcggcctccgaaagtgctgggattacaggtgtgtgccaccaaacccggcctccaattcttaagagaaggtaaacatattccctgtctctctgcctggggatatgttcatacctcaaggcagatcaaattagagctcaagtagtgaagcaatacctctgagctgataaggcaaatatgagttccaggccactaaaacaactgaaatttgctgagcaggatcacagaaaataggggctacataaagtaaaggacccagaagtctgcatgagaatttaccatgggatcttgactgagagaagttgtacaggcataggataaaaaactgtgagacagcagaaattttttcttacagagaagatggcagaatcatgataccaaaggccttttaagcatggatgatagaattttggtccaggaagagtagagaaacctctctaataaactaatatattcaagtgagatccaagaaaattaataactattaataaagactacattctaaaataaagcccacatcctaagtatcaacttaaaattgaaatcattatgtcataaaaaataataaaatcaagcttcacaatgacagtaggatctgccattattgaacatattgtcaagaaagaaagttggcacaatccagatgtcttataacacatcactgtaatgtccagaatatgatacaaattactaggcatgtgaaaaaaaaaaaaccagcgaaaatgtgactttaaaaaaaaagtcaatacaaatagatcatgcaatatcccagatattgtaattaactgataaagccatttaaagttcaaggacctaaaggaaaaaaaaaagtgacaatgagtgaacagatgagaaaactcaatagataaattaaaactaaaaaaaaactgaaattatagaactgaggagtccaaaatctaaaattaaaaagaaaaaactgggtttaagggcagtttagacgctgattacaaaaaaagctttgtcaacttaaaaacagatcaacagaagatatatattttaaaatacagagagaaaaagattgacagaaaattagcagaacttattccttttgtctaactgaaactggtgaatatagttaataacagtataacatatttaaaaattgctgagagtagatttttaaaggttctcactacaaaagaatgagtaggtttggtgatgcatatgttaattagcttgatttaattattccactgtgtgtgtgtatcaaaagatcacactgtaccacataaatatatacaattattatttgttacaattatttaaataaaatatacataactttaaaaagcaattaaaaagaaaaataaataaaattaacagagcctcagtgacctatgcaaaaatatgaagtggtctaacacacaggcagtggtgtattaggaaggagaaaaagaaggggcagaaaatatttttttgaagaaatttcctcctcttgtaaaagcaaaaaaaaaatcacctttcatatccaaggagctcaataaatgccaagaagaataaatacaaaaaaaactcatatctagacatatcaaaattatactgctatcataaaaagctaagataaagaaacattttataatgtgccaaaggcaaaaacaaaacaaaacaaaacagatcacaattcggggaacgattttataaaaacagttgacttcttatccgtagtaatgggtgctagaaaacaatcgaacaacaaatatgaagtaacagaagaaaaacagaaattgacctgaaattctgtactcagtgaaaatatccttcacaaatgatggagatgcgaagacaatgccagtcaaacaaaagctgagagaattaatggtcatcaacattttaaggatgctggaaaaagttcttcaggctgaaggaaagtattaattgatggaagtagtttccaggaaaataaactgtcctcaaaaacatagaatctagcacagtaattttcatcaaacaatggcctgtggggctcagtccagcccactgactgtattgtaaagttttattggaacacagccacgtctgtacatttatatattatctatgactactttggtcctacgattacaaattgagtttcaacagagatcatatttcacctttacagaaggaaaaattgctaagtcttattgtaggggataaaaaagcagacaacataataaaacataacaagactaatatataatcacgtatagcacaaatgtgtgcattgagaaaattcaaatatctctttaaacaaaaaaatagagctacttggaaattttcactggttggatgagagatcagaaaagtcaaaatgtatgaatgttgagtaaatagccactgcctagggcatttcatccaccagaacagaagaatggcaaatgattctttgatacttccagtgttagattcaagaagtggcatttaaaaagtatgattctcttgattgtatcagattttcaaatttactgcaaggaacactaaattttgaattaggatccccacttttatgcaaaataagtaaatacataaagcatttatggatgggtttatcctgagctcagcttttataaggcttacttccgtaaggtataaatttataaaaaatcctttcacagattggagatttgtcgccagatttgtctggctattagattgtaacagcgcaggtgggaatttagggaaataaacagtactcataaggacctgttgattaatttgagctcagcctttctatccctaatattctctttcctttctctctctgcacatctgtgacactggagtttggcccagaggaagaacgcacagtggagataaagagatgtgtgccaagaaagccgaatattcagatcagatgggatgcagatgaacatctgtgctgggaaaaaaaaaaaaaaaagaaaaaaaaaagccaaggacagatactctcccaatgttgaaataactgtacagaattctacccctacaaaatctctctttttttatagagtttttcatttaaagaaatagtgtttctgcactgcacttaaaggttatttgcctgctcctttgcaggtgtgtgtgtgtgtgtgtgtgtgtgtgtgtgtgtttcttttttcagtttaccaattcaaaggcgcaggccaacctcctattatttgtgtccatatttaaagtgggcttgacagtcagatttttgcactgacaggcacacaataaaaatcatgtactgttactagttttctaggcagaattatttcataacaattatcttcacatctccaatgttctgtgtgctcaaaaccagttgtctttattttaataattaagccaaagtgacagtggctgacagctgcaattggtttcatttgtgaggcaggcactgctttcagtatcaccatggaatccttctggctcagtgtcagaatatttaagccattgaatgtaaccaaatttgcagtcagacaaggtgcacattttcaggcaaacacacattttatgtgtgtgtaacaccatgcattttctcaccgactcccaatagctttagcaagatctttaaagtacaaatctacaaaatatttaatagatgcaaagggcatttttaaatgaaactgctttgttccctttttgtgctattaatccaagagttggtcaaaattttctgtaaagggccagatagtaaatatttttggctttgcaggccatatggtctctgttgccatgactgaattctgcccttggagtttggaagcagccatagacaatatgtaaatgaataggtgtagcttcagtccaataaagctgtatttacaaaaactggctgcagggaagattcggttcatggtctgctttaaacaacaattcaacatactttatttttaatataatgcacaacattttaagttgtttttcccttcctgattattaaaactgcaaagcacttctagagatggagaaagagtgattatagttaaaaaaaaagatttgagattatttagtatttgaacaatacaaaatgtattttctataaatataacgtgatatttacatgacatataaaaaattacttccctgtagattatctcattcatttcagtaacaacctggttagtcagggtgacaggtatgattcttcagccccatgaagcttaaacaggttaagtggctttcccaatgttacaatggctaagtgcaaaatcagaattttaccttttccatttggattctaaggcttttatttggggcagcagaccatttagggacctgatacttggtggtgatgttgattcaacagaaatggtcctaattcagtccttgatgtgcaattactgttagaagtggcaaagaaattaaatacctcttatattattaaattaatggagagagaaagactggacaatttaagaaaaaaaaaagcctaaaatactcagtatttctcagtccaaattatgaaggtaattttctcaatgtagcctttaatgcagaactcctgaaattcaaagagagactctatgattccctcctggccaactggcattaactaaatccattatgtatgtttttggcttctgtgcaatttttttttttttggtcctgagatggagtctcgctctgttgcccaggctggagtgcagtggcaccatctcggctcactacaaccttcgcctcctgggttcaagtgattctcttgtctcatcctcccgagtacctgggactacaggcacctgccaccacacccggctaattttttatatttttttagtagagacggggtttcaccgtgttagccaggatggtctccatctcctgacctcgtgatccgcccgccttggcctcccaaagtgctgggattatagacagccaccgcgcccagccctgtgcaattttattgttacaaatttcattatgtaaaaaagctgaaaggagagacaaactatagcattaagaatttgggtatagacagggagctatgagcacaggaaaccacgctcatggagcgtgtctgtagctttcctgtccacctaagaactaaccaacttacaatattaccgtctaactttcatctatattgatgtttttttcaacaagagcaaactgttttggaaaaactgtctcaaatatctttaccacgttggtctatgatcacagggtttacaatttccattctttaacaatactttttctgaaatggctcttttagaaaaagacgagttaaactattttactgttgtatgtatataaaatctgagaatattggtaatttacgatgggtctggtgatgctaaaactacatacatatgaagattaaagcagctctttaacataaagttaggtggatatgacttgtttgaaaaagtatagacagcgggcacagcttttcacagactacaaagatgatattgctgatatgtaagatgaaatggcaatatgacaaatacaggcaggctgggcgcagtggctcatgcctgcaatcccagcacttttggaggctgaggcaggtggatcacctgagttcaggagttcgagaccagcctggcctgcctggccaacatggtgaaaccccatatctactaaatatacaaaaaattagccgggcgtggtggcaggtgcctgtaatcccagctacttgggaggttgaggcaggagaatcgcttgaacccgggaggtggaggttgcagtgagccaggattgtgtcactgcactctagcctgggcaacaagagtgaaactccatctccaaaaaaacacaaaaacaaacaaacagaaaaagacaaatacaggggtctgttttcctctacaaacagacatcaagggtgagaggtgggactgagagatgtgtagaaattttagagtgaccatatttcctcacgtatccaggtagaggtaaagtcactatattagtggctataaaaaataatactcaaggaaataattttcactttataacctacttaagtacagttggtggcaccttaactggagtcactgacaatctcatctattgagatgtataaaagcggccatggtgaaatggtttctgagtctctacaagggcatgcgttatttttgcatcactttattactatcaaaaggtagtggaaatagtgcgtggaaagcagtaacatttgagttttatcttccttcattcatgaccgaactcttaccagcaagaggccaaaagaaaattgcaagtgccatcactgtagaacaaatccaacaaaaagacttctgaggcttctttaaattctttgcaaagactggggcctatagctaggctcttcagtattaggtaagtcagtgctggcaaggaccatgaaatcgtcctgagtaaataccaatgcaagttccaatagctgtgggtatggtgtgggggtgagctactggggccagtacagggggacacagtgagcgttgagaaagttctttaacaaaaggctgtcagatatgatttactgagttggactccactgggcaagcctcactgagcactctgaattcgagctttccacactggcagacttttccataatccaacaaagacatagagttataggcagttcataaaagtgatgtcttttgtttagtcctaacagggtctctcaacaggggagacagaatcaatgaagtgctaaatataatatgaaatcaatttcccttctcacatcaccctgaggataagaaaagattcttgttttcctggggctgctagaaaccccaatgtcttccgggtggttggaagagaagaccaagagaatttaagaatatttttagcttaattagtttaggcacttcattttgagacagatttagtgcatgtttcatctgtttaaagaatcacaggagtttaagtaagatcgtttctccagatagagggtgaagtagtttgagaagagagttatgcttaatgagatccactttcagaaaaaaatggtatcggtggctgaagagagagaatactaaactatgagccaggaccaaccctaataacttagaaaaatttctaaacatggtgatgtaactatttgggtaactctgtgtcatagtaaagatttatggcagacagtttaagctgaacttgtttataagccatgctatgtctagggatatgagtatacttcatgtgtaactactgtgtaactatgaggatgttggtaaacatagataacatgtaaagcattttattattttccttgatagaatatctcatagaaatgaggatcagttacttataggagactgctaaggtatgaaagctacatcttattttggtatatgatagagaattttatttaaattagacacttagacactctggatccctctataatgtgttttccagccctgtgactctgaatattatattcctatattatatatatatatatatatatatccctatatttcttttaaaatgttttcttgctgtaactagtctgtaccagtccatctgaagttatttgtggcattaggtattttttcaattttcttcaagtaacagcttattcaatagtatagagtaatgtcatttttacttttttttttttagacagagcctgaccatctttcccaggctggagtgcagtggagcaatcttggctcactgcaacctccacctcccaggctcaagtgatcctcctaccccagcctcttgagtagccgggaccacaggtgcacgcctccacacccagctaatttttgtactttttgtagaaacagggtttcaccatgttgtacaggctgttctcgattttctgagctcaagcaatccatccacctgggcctcccaatgtgctaggattacaggcgtgagccaccatgcggggcctcatcctttttttcgaaacttatactgcagataggtaattcttaaaactgagaaagaatacctgagtatcagagtattgatttaattcctctatgaaaaagatgtcaagatgaaattagatatgaagaagatttattggagaaacaccttcgatggagaaaatgaagagagactagaagttggcagacacaggtctgtgaaaggagagagggaaggaagaagggtagggtgggaaagcttgtgcagctctgagaaaatctcagccaggctaatgaggatccccagagaaaaaatggcctgtaagtggagtcctgcatttaaaaggaatggctcagctctggcaccctcaccgtgtacactagtacccacattgtgcttagggacagagggagtatggcttacattcccaagatgaggcagctggaggacatcagcctcctataatcctgtcagcagaccctctcttgagggatagtctgagcctcatattctcatagtgaccacaacttggaaatctcatatgtagagtattatggaatattagtatcctaaaaataaaaaacaaaaaatgaaactacatgtgtaatcatatcacaagtctgatttcaacaactgtgactcaaacatacatgataggtacagactattcaaggttaactcgtggaaaactctaaaactaaaataattttacccatgaattatttttcttaactttggaaagaccgttaatttcagcattcacaggaaaaatctttggatcatctccaagcatattagagttcagtggggtcacacttccagaaatagtagtataggtcacaagtgtcatttctaacaataaaagggtaattcttgttcttaaataatgaaatatattatgtgcccactagtagtgctcaagaggaacaaagcaggataaaaatatgtcttcaccacctctttattcctcctttacctgccagtattctttcagctgtctaaattccccaaagttgctttgaatgttgtgctgctcccaactgtgaaggaatcagcagagcaaaacatactggggtgaatgagactttctccaaacatttccctcctttggactctacagtcccatcttatgggtccattcattgacagttttttctctgccaaggcccagatgaatgccttgcagacataatgtgtattaagtaaattctgaaagaaaagagaacttttcagcttatttcctatattgagagatttttttaaaaataagagtacacaacaaaggtagggtaacatgcactccaggtgcccttctcagcctgagatagatcatatgcttcatgaagaaacagactcatatctcagatttatttaggatattatctgagcccaaatgatattccctgcccagttatacttgccgtgctcacttttcataagagacaatttgttcaggtccatttgtccaacgcaatgccgagttttaggctgtgccattgcagaggtagttgtgctaccacatgcccgacctatttatcctttctgtggcttgagcatcattccctggacaaatcaatggcagctacgctagcagggtttattttctcacagcactcatggcatgagtcagagctgctttgtacataaagaacctcttggggctgctttccgcagaagaggccaattagaattttatggactctccagtacaagtgttaatgtttgataaaacctaactgtgttgctccttgcacttaactgcatttaaccattgtttcagtgcctattactgaaagagctaagcttgcattacggtcacagtgctcatatttgcttcaaatcatactgcatgttcttctttagcaaaagtccaagtttgctcatcaaccattggctccaggccctggactaatcattgcactttttgttactgaagtgaactttatcttcggatcttgtcatggactttaacttctgtttctagttcatgatcatgattttttttttttaatgataacttggctctaaattcaggttgctgcatgattacttaggacaccaaattctttgcagctcatatgtggctgagcaccatgaacaagtaagggtgtaaggctgtgtctgccaataacaggagcccaataaagttaattgtttctccgttaggcactttgctagtgccctgaacacatggaaccgattatctggcactgcaatgttgttaaataaaatgtgcaaaaaagaaaatacaattattgctaaagtaaaaacataccacaaggggttattaaaaaaccaagatgttttacattttaaggatgttttgctgctacatgtgtgtgtttggtgaaaaacgattagctccaagacagtgccgtgccggtgttaaatttttccttctgcttcattgtcttccagtcacctgaaataaatggaagcagactttttcattctgaaggaaaagaatgtttttttaaaaaaaaaattaaaggcatgtttaggcaatgttggaatgtagcctactcacgtaaaacatgcatcttatactctaactaggatgtttcttcaatttaagaacatattcagttctatcagccctatggacaggtctgaattgcttatgaactccgtttatctatgagagaatatcatcacctaaactaactgcattctggagtagaatataagttactttggtaggatagaattataatcctcttttagttatgcttcagaaagccatgggggcttaataaatacaatgtgtttataagataaagagtcctcatcagcttccacttagcttcaaaggttttccatttctcaccaacactttaaaattacatcccattgcctacctgtaaggcacacattggccattttttattttaaattatttttcccatatttcaaataactgtgatcataatatatttaactaatgcccactagaggttattcaagaatgctttgttagacatttttgggtgtgcacatgtcctagaaggaatcaaacagtatttatttcagtaaaacacattatgagctatttgaccttacagattaatacatatatgaggctaaaaaaccctgagggtgagaaaaataaaaagacattttatattttattatctaggtcttcaatttttttaagaaaagtttttttttcttttctctaaagtaccaaagcacaataataacataccaacaaaaagcagacctgaaaaaaacagatttagaatctggctgttaattgtcttaccaaaaaatgtagacatgtcttccttgcttatcaaagattcacccattagcacttcgtaacatcacattacttgattttacccagttttacctaccttcttatgaataatcagaatgatctattagagacgtgactggaattttcaaaacagaacgtttgtcattcaaaattgtcattgcatattcattacaagtggatgctagtcaaacacaacaatgtcttatgcattcttaaaataataatttcaactgattattaggtctttattctgcttattctgtagcctttatttttaacatgttaaaagaatgattaggctggcagaacctgataaatgaacagaaacagggattttttttccaatggacagaatcagggggttaaatcctcataaatttaagacaaccttctttggggcagaaatacaaagcacgctggctacaatgaactagagaagcacaaatgcttcctttttccatattttagtggagcttggcaagctttgctctttttttactctcaaaatcactgagatgtgttcacattcccatcataatgttaaggacttccaagacctgaggcttaattaattaattagttaatatttatcccatgccattctttttatttagttctcagggaatattcgatgagagaaaagttagcattgaccacgtcagaaggaagcaacagcacattgagaaactgaattgacccagagtgaatagttacactggaaacactgtcatttccttctcaacttcaatgtcagacagagcattcatgaaagaaataaaatgtataccccagctatgactttaagttgttcaaaagactatgcttacagctggccaggagcggtggctcacatctgtaatcccagcactttgggaggccgaggcgggtggatcacctgaggtcaggagtttgagaccagcatagccaacatgatgaaaccccgtctctactaaaaacacaaaaactagctgggcatggtggcgggttcctgaaatcccagctacttgggagattgaggcaggagaattgcttgaacccgggaggcagaggttgtagtgagctgaggttgtgccactgtactccagcctgggtgacggagtgagattctgtctaaaaaaaaaaaaaaaaaaaaaagaaggaatacgcttacagctgcctaattgatttaagtgatatcaaatataaagctgtagcatttccaagaggaagtaatttaggataatgtgctttaacttccctttacttaaaaaggcagctagctgacaacaatttaaaaggactttgttaccatcatggatccatcagtttttatgaaatgatgattcactatggataaccctgatttctttgagattttgatgtgtggagaaaaagatgatttagcttttattaataaccgtttgtgcaaaatggaaacagtcatcgtgtagcatgtagccagaggctatctgaaaggggatctgggagataattatagaatgccttaaaggacataactaggttttggcaacttcttagaaaaatttgcaccgagattgcttatttaataggttaactaaatcattcaaacgactccttttatactcgttacaagtaatgtaatataactaccctgtactttatcgatttggcataatcaacatggtttaaaagaagccacatttttaagtttaatatataaacatattacatgaatattgcaatgttcaagaacaaaatcttttctcttaaaaagttaatcctttaaatttgttctatattaaacctgtttttgatcaggtaaaaattggatacattttagtttaagacttattctatgctacctctatgatttttaaattcttcataggaaaacataattaacacaaaatcttactagaagtcctactatgtgaaacaagcaaaggagtatcttattactgtatttattttttaaatttaatgtttataaattcagatcattactgagctctcccatggaaactctgaagttactctgacaaacaggaatatctctgaaatcatggcttgtagatgatcgtggcaattttactaacataccaatctactatttattcctgtatttttatttcattgtataatatccagaaaaccttgactattaaacgaaataatatacagtaacaaatttaaggtcctactctgcaattccaggaaaatgatcacataatagagatatcttattatgagatttccaccatgctacatacattcaacatagcatgctacaaacaaacatagcatctcgaaagagcaaacattttgtatatgctatatgtgtttgtaaaggttttagaggcaataagcatgtatattatgtatattaaaaagttacgaatcattttgttctaaatcattacagcattttctctggaatatagcattttcagaaccacaatgctcattgaaggaattgaagaaaaataattataattttattcttagcatttataattgatttaataaaagcaacatgagaataatttaagaatgagtaaaaacaggggttttgtttgtgagtagcagagggtccctaataatagggtattaacaatgaaaatgtatttctcttttacttaagcaaaagccagagataggtagctgaattcatcctcagtttcatattcgctttttagccatgaggacagagccagaggttgggaagggtacacggctcttaacccttcaaggatactttttgacattgtcatactacttctactcacatcccattaattagaaataagtaatatgtgtggctaacaatcataggaaaaaaagctaaacatcactaattattagagtaatgcaaatcaaaatcacaacgagataccatctcataccaaccagaatggctatcattaaaaagtcaaaaaataacagatgttggtgagattgtggagaaaaaggaacacttatacactgttggtggggatttaaattagttcaaccattgtggaagacagtgtgatgattcctcaaaaacctaaagacagaaataccgtttgacctagcaattccattactaagtatttacccaaaggaatatacattgttgtatgatgaagacacatgcacacataggttcactgcagcactatttacaatagcaaaaacatggaatcaacctaaatgcctatcaatggtagattggataaagcaaatctgatacacatacaacatagaatactatacagccataaaaaacaatgagatcaatgtcctttgcagggacatggatggagctggaggtcattattcttaacaaactaaggcaggaacagaagaccaaatacaacatgttcttgcttataagtgagagccgaatgatgagaacacatggacacatagaagggaacaacacacactggggcctatgaaagggtagaggatgggaggaggaagaggatcaaaaaaattaactaatagatactaggcttaatacctggatgatgaaataatttgtccaacagacccacatgacacacatctacctatgtaacaaaactattttgttgtaaataagatatctattactatgtaaaaagttaactttttaacttttttaacttaaaagttgaaaagaaagaaagaagcaatatgaccatatatacttgcagggaatttgggaactgtgatctttatctggagtttctgtattttctacaacgacgaaagaagaaggaaaggaaccagatcccaaacactaagaaagagtaaattccacctgttgctctaaatcatggcatattgactttacatttggagcttgtaagtcttgtaaaacgccccagctctgtcctctggatcttgaaacaagaatcattatgggttttctgtagaagttttagccatcacttccatacccaaggtcaagaatgatacgtgccctcaggctggaagcagtgaatacaaaaataactttcagtatcatttccttccttctagggtcaacctcaacttaattcttccttgtttccattgctttccaatgccttcagggaattgttttttgtattttgtctagaatttatagctgttatctgtaggacagttagtccaacgggagtttaccagccataactagaagaggaagctcatggaagttttttccctgatattttcatggatggtttcttcctgtcactcagatccaacataaatgtcacctttttactaagacttttcccgaccttgatttaaagtagccctcaatctcttgtttcagcactacaaggacttgtagcataggtagcactaaaagcagcctgttttaagactgcttgtagtgctaccaattacctaaattttctttccttccttatttaacttatgcatggctgtctccctctgttccatcagatcattgttcaaaaacacttctgctacattcctaaacaaacacataaacacacataaatacaaacacatgcacacttagctggaattcccatactttctaatctgcccaggatagtctcagattatgcctattttcatgccataataattcagaacatctattactcataatttaataaattggactaataaattatatgataatcatcaaaacacctattatgctaattgatttctctttataacaatgattaccacctgatatactaaaatatatgtgtgtatatatagaaatacataaaacatattacaggtaacatatgtctatacattagactatatgtctgtctcctcattccacaacataaatttatgagggcagggactttgttttgctgttacaatactgctagctaggacagctcttggcacatcaaagatattcaataaggatttgttgaagaagtaaatgaataaatcaattagttttctttacatactgtaacagaatacaaaattcatgatgctgagaatttgtaattgtatttctctatcttatcccctgtcccaggcatacagtaggccctaattacattaatgaatttatcttacaacatatgattaatattttttcttttaaattgttaactaatcataggggaatgatgagctatgatgcctgcataggcaactcatttgggttccttttgatgctgttcagatcttgtttaccccaataactatgggttttagcaacaatcatatttccatttatattgtatgaacagagagaaggcaatttctaaactgtcaaaaaggcagaacaatggctatcagtgttcacagatggtcatgtcctcgccattgggatgtgtgggtgtaaggtacatggatgtgctttggtcaaagaataggccgaggcacatatctaggtgcctgcatgaatcagcgagtttggcgcacacctgcgcacacctccacttgttatataacctgtttgtgtaagttcatacttggcttggagccactattggctataaaaggtataactgccctgttgacactgtgcacaagcgacatggctcttggggtgcagtttggctcaacatggcttaatgtggtgggcacatgggcacccagagaaagagagagccagcgctgtccttcttgtagttggacaggagggagcaaggacacagcttggcttgcttgtgccctgagagagaaggagttaagctgctgacccggaaggcaagggagagccggtcacacagctgtgtgtgagggtggctggcttaggcagcctagacagggcaaacagtgtaagagtaagctgctagtgagaaagctgttgatgaaaactgctgtgaataaaaccatattcacctgactatggcccccagagtgttccttctgctcatccacccactcccctcggactgcaacatggggtggacctggatcccgggatctgacaattggtgatgaggatgggatgaggtgagtgggtcttcagcccctgagggctcctgggctggctgtagcaccaaggtgcatagcaccaaggaaaaatgtgcctttgccagcagagtcagatgggcgttgtgactgggttgcaggatgtgcatgcccagtacctgcaggatgtcatgcagggaggaggaaaaacctctgttgcaggctcacccagtaatctgccaaaaaataaagcatgagcagctgttgggctgcaaggggagagcccggggaccatacctgcctattgtggtggagcacacttcatagtgactacaaccccagtgagttgtgggagtttaagcaagtaatgtcggcagtcacgtacaaacttagtgcaagtcattcaggagaaggacatggctgtgcaacctagtcccaccaggacactgcagctcaaggactatttgcagacaggcagagatatgaagccttttctgtttgataagacaactggccaaggtgcctggcttgcgggacactggacgacgagtgccacatgtgtgcttggccatccactggtctctgaacccagataagtttccaggcatagccgcatttattaatggctatgaaagctggtcagtgaaagtgaaaccggtgtctttgcaccttgacatcggccacttggctctgcacttatgcactgtgtatgtgtctcccatgcctgagaagattctgggggtggatgttttgcacagcttggcagctgcgccgtctatcacaaacttaatggaccagtgggcaatggaactggacagtccatcaagatccagaaacagtttgccttcatgggaggctgacaatggactttcacagtgttgctgcagggctatatgcatagtaccatcgtatgtcatggttttgttggtgatgttatattaacctctgattttcttgcaggtttagaagtggcaacgcccctcttgcctgggattgggatgatgcagctgaaacagtctttcctggtagccaagcaggctatttagcaggcacaagccctatgggtagttaaccaggggtgcccatttaaacttgatgtgcatgtaaccacagatagtttgggctagggcatagccgtgcatggagcgcttgggtgcgccactaggctattgttagtcccagctgtggaagggagctgagctctagtgttccttaataaagaagcagttagtaatagcaggatggttgtgttcgtgagtaacgaccccctgggctggaaaagcagttagtaactgtatatgctgcccttcgggctcataagagcgtggcagggtaggttacagtcattgtgtggagtacttaccaatagcagaatgggtatgttcatgtgtaacaaccccctggacagggatggcacagacacccactttagcaaagtggggcacctacttacagcagtggagtacactgagtacaagtcccttagcagcagaattacaagaaatcttgggacctgtagtcttaattcaagataaggccatggggcctgaggcacccctagaccctgagccttcaccgttaggatgggcatccccccgttcctaatagggtatggtatacagataggtctagccggggtgcttctgctgcctgactgttgttgcagcccagcctagtactaacaccatatggtatgaaaccaggtgtaaacagagtagctaatgagctaactcagggcagtgtgaataataaccaccaaaagggtgacacctgtggtaatctgcaccaatagctgggcagtttatcgaggcttatgtatgtcatgggcctgtgtgcctaaagcctacgtgtcaagctactgtgtcaagcctgtgtgtgtatatctggcctgtatgcccaaagcctacggtcaggctaatgtgtgtcaaacctgtgtatccaaaacctacgtctccctcggcctgggggggtggagtgtaaggcatatggacgtgctttggtcaaggaataggctgaggtggatatccaggcctgcatgagtccagcgagtttggtgtgcaggcgcacacctccacttgttatataacctgtttgtgtaagttcatacttgacttggagccactattgtctgtaaaaggtataactgccctgttgacgctgtgcacaagtgacatggctcttaggctcttggggctcagcttggctcaacatggcttaacatggtgggtgccagggtgcccagagaaagaaagagccaaagctatccatctatgcagacagacaggagggagctaggacacagcttggtttgcttgtgcccagagagagaaagagagttaagctgctgatcctgaaggcaagggagagccagccacgcagctgtgtgtgagggtggctggctcaagcagcctagacaaggcgaacagtgtaagagtaagctgctagtgagaaagctgttgatgaaaactgctgtgaataaaaccatattcacctgcctacggccccccggagtgttccttctgctcatccacccactccccttggaatgcagcatgggctggacctggaccccaggatctgagagtggattacctaaatggcaactgcaaaaaaacttggacatcctgattaagtggcagcgagaacttggaatatctgattaagttaaagatcttgagatagggattatcctgaatgatctgggaggggcccagtgtgatcataagaatccttataaatcagagagggagactggaaggctagagtcagagagatttgcagatgctatgttgtggctttgaagatggaggaaggggccatgagccaaggaatgtattcagcccccagaaattagaaaagtcagggaatagaatctgccctcgagcctctggatggaccgctcttctgaggcctccattttagcccattgcaacccatttcagatttctgacttgagaccagtaagataatacatttgtgttgttttaagcagctgaatttgaggtaattagttacagctgcaataggtaaattgacattaaataatatacttgacgttaggcttctttactgtaactcacttctggatggcatgttgttgtctgtttttacctttctccttccccgccccccaattgatctattaggaaatagagaactatcttcatttctgctccttcttccaggcttgaatctacacaacaggccactccccaaaattcctctgcttaatttagagagcaggtttcagggattcacctgggaacaacagcagcaggcacctgactcatattcctggcggagaggaagggaggccatgtagctgctcttccgtggacgcggatgcttcctgcctcatagccgggtcgcctccgcgctaaccccgttgaaccttgcaaccagcccctctagagtgtggaagaaaggagcatcgacccagcctcaggtttcacttctgttctagtttatctatctaacttagaccacatgtctgtgctttcagaaaattttcccatttttgaatcactaacagtaccctttattcttactactgccagggattcactatttttaaacagctttattgtcatttcagtaggatttggggaagaaaaggaagcgaatacatgtgttcaatccgtcatgttgacttgaaactgctgttttaaactgctctctttctacgtatttgattccttttgctctacccatccccatgtgcctctacttgtcaagtattgggagattatataggtttcttgtgtttgttgtggtgatcaaagtttcttggggcagcgccctcattatctgtcaggcctggcttctatgattgagaacaggtgcagccaagcctttgctctccctaccacttctgtctgtcaaatagaaagcaggagggagcttttctgtgggatctttcctttcctctcaattctctttgctggagagctctccaggatattggcaaggatctgaatttgtggctgaccaatggttccacatcctgccatggcccccacaaattttgcagttttgagatagtagattttgatgtggttctgctggagtcatatctcccatgtaatttcaatttaatcagcttccgttcatgcagtgaatgatgggttcatttatctgtgctttatttgtatatgatgaagtaattttttgaaaattttatacataaatggtagcattcccttatttctaaatcagatgctgggcttctctcaatcttttgtatattcctttgattattagaattataggtgggtgaattcaagataagagttacacatatgtgcctgaattatcactcacagacgatcagatatcttaatgtaatcaataatcttatatccattctctttttataagtaggtaggttagaattcagtttatccattatgacttcattttatagttgaatcctcaattgcattagaagatatagaggcctcactgtctatttgcatgatgctttggtgaattctgctatattaggttgttagggtcactggggaccagaattatttgagaagacttagcatggagcatgtcatttcttagaacatggctgtaaatgcttgttaaacgtgagaaaatggggcatgttaggaaagccagaactggaaataaatccaaaaaattaaatatagctgattctggggagataaatccatttttaatgatagaaggaaatctaatagacaatctaatagacaaaacatgttatctaaagctcaaggcaatagacaataagtgctatatatatttagggtcctaactcaaaagtgtgccaaaagtgacagtgggtaaccaagagagagataaaagatgtccggaggtgttacagatacttggaaaagaagatacacaagtagtttcagaattctgtcagcagggagagaaggctcaggttttttagctgaatagcaggaaagatcagtcccaggggaagagaactggctctgaatgaaggaagtatatataggtactaggccttgtggataggaagagacaataagaagagctagataattacagaattttatctgtcacaatattgcgtgcttataacatcaataaactaaaagtaaaatcacaaaaccaccaactttacagtaagcttctttgcaaattgtatggctttgtgtttaattaaagcttactaacgggttgggctcagatagttgtactcagaatacattttgacttctttaagcctaagataagaatgttcatcttcatttggatggcatttattacacaaacccaagaattccatgatcatatcaataaaaattaggagaatttcattaggcactataaataaccccttctcctgagacaagtagagaagcccgagtgagtaaccaactgtccccaattgtattagccttttaaataaaggattcccagcaaacattcagaagaaaccatatgccttccagggataggcagctggaagagagggaagagattaatacagaaaaaagctataggccatcccgatcctattcttcagttcctttattggaggcattaagttttattttattaacttctttcttgcccttcaaaagttgagggtgctcactccagggcttgtggatatctgccccagagaacctcagtgcaaaggtttgaaatcacagctggctgtgattagaaggattgggagagatcagtgcttgattaactttcagctgctattggtttgcctcagttcctgcaggagaattaatctgtaggttcgagtaaattttggatcttaatggataccagatacattgagcccacccagaccaccaagattttgcaatccttttcctcacatttaaatggtacaaatgaattcattcctccttactcagtgaacagaataactctacctcaaggtttttctcatatagcattcacttgattttgccttcttttccaagaaagtatagattcgttggggcaaggtgcattttcagaagtatgactttaattatttgcattcagaggcatttgggtgaataacaatgcatcctgctccctttctcttaatttgtgtttagtgcacataaaattatgccagctctgtaatcaataattttcattcttttgcacaagattcatcttcttcctcaactgaatttatgccgtcctagttaaagattcttgcactgccaatatatgcttattattatatttcgttattatctggataacactaaataataggttatttaagtgtttttataagaactcaggttttgggactcttgcaatctttactgactcatttcataacgaggaggagttcctctttcctgaaagagtattgtacttgtgaattgggaaactcaacacaaaagaaaacacctagcaaaaaagtaacacacatgtatttgtttaaaccccaggagacttcaatttttctgatagattattgtgatagcattgacctgggagacccacactgttaagatcagagacaagtaaataaaaataaagtattaatcatcataaataaatcaaacaaattttcctaactagcatgtaagtcattcctttcatagaacctaattgtgggaagtggcaggagataagccgaaggaattcagaacttatcgtaatgctcatgtatttctttgaaaattttacataagtgtaaaaaataatttttcttttgtgtttttgttaaaatcacttacaatggattaaaacaataacaataaaaggatggctacttacattctggtacaggaactcatacagataaatggccagaggtaattcaatcttgaatctcttgaggaaatgaacctgttaatgtattttaaatacattagtaattagagaaaagtgaaaaaaaaaaaaaactctggatatcaatgtctttgcagctcaacttggctgacatttccctttcgctaatgaaattagaattttgagcatgtcagaaaacacatgatatttccaatgcagtttggttcatcttactcttacgtacatagtagtgaacttgtctctaggctgagcagtggtttctttgttttacatggtttcctttccagtctatggcctttcattaagtgcatcacagataatgctgaaggactaaatccaagaagcaattgagtttacaacaaactaaggattcaaagggctttaaaggaaccaatttactcttcttcctgcactcatctttgctggagtggctgtggagtacaaaagtgattagtcttctaccacaaatgtactctgatacctatgtttactcaatttcaggagcattacctgtatttctctcatcaaaagtccaatcctccaagctgatttcgcgttattattcagagaattgacttgttctcactaaagtgaaagtcttagaagatactgtatttttaaagttgtgctaactcaaatatgggcctacatctacatgtagaaccttctctaaggttttcacgaaaagttagattaaaaacaaaacatgctctgtttagaaatattttggagaaagctagcattttttgagaaattagttgctagaaattatttctcttaagtagctctcacttaacaaaatatcttctctactctttttttttctttctttctttttttttttttttgagacatgatcttgctctgtcacccagctgctggagtgtaatggtgccatcgcagttcactgcagcctggacctccagggctcagcctcctgagtagctgacaaccgcaggcacacaccaccatgcccaactaatttttgtcctggctacttttactcctaaaccttctccttctccataaacatcatatttttcataacttctccccttccactctttataccagcaagacgaatgttgccccagtggccaaatatgtgttatttcacattgccctgctctaattaaggaggtgtgaagaaggaaatgctagcaacagcaatgataactcaggtggctttgtgtgtgtgttctgggagtggagtgtctttaagtgagcatattggagcacaggatagacaggaagagctccagtgttagtaaaattatgaatcattactatgttggggacttctagaatttaggtccaaaacaattctcctgtggttgcaatccattataagtcattcaattaataaagaatgaaccaattaatggaaataatataaaccatagacttctgaaaaagtggtaaggatttttgaaatatatcctaatgtgcaccaggagtcaagtaacatggacagagtatttactcagcacataagttgttaggcacagattattaagactaaagaaagacacttcaaatgaaaacactaaaaagaagagactttaaaaatcagaaaatgatattgatgcccaagttttcagtttggagaagagcaaagaaatgcaaacaacgccatttgttattgtatagttctaaagccatttttggtaaaaataataaattatttttgagaaaaggtgaaattatcagtaattttctaaagaactataatctaacaagttattatatagctctaaagccattattggtaaaaataataaattatttttgagaaaaggtgaaatttatcagtaattttctaaagaactataatctactaacaaaaaagactatataacgaataagctgttggatgattttagcctgatgggaagttgtgagcatttaagatgaggagggacctgttagtcttattggaagcactgtgttatgttatacgtatgtattagcagttgcatcgactcatagttcctattttgtttatttctccacatatgcgaactcctgctcctcattttcctgttcctcattagacaccttaagggtcactggcaagcagtggccgttttatagaaataaaggtctagcatgaatgtgtcatgaagttggaataactttctcttcccctaggatccagcaaatcaaggttgaaatccgttgccaaaagcctagggctcagcagggggccatgcctggaagaaaggggggttatctttgcactggagggtgtagttgctgtatcttccctgctgttaaactacacttttcagaggctactgacctgggagctttcatcagccttaaacccacttttaataacaacaagctcagggaatctggggagttgttcaccaatgtctggaactctgacagatatcttctagttctgcttggtaaggtccaccgctgtttcatgggccatgtctcttctccagcaccagttcaggaggcaaaaccaaacatcgccttttggaatgagacctacaaataaaaacaaattaactcacctcgccacccgccccttccctgcccctggaggtacatttcagcccagtgcttgttttaatgttctgttttacagctttttgtgttgaattcttttgacagtcactgttctcagagtgggggcactgcaattcaacttcctcattaatcataatggagaactgtgctcacatgatcccagcgcatggactcttctcagcttgcagtcctgcttgttgcaacaaacaggctgcaaactgtgtttactttacatgtcagatattgttagccttgaactggggcctcttgtgtgaactgatcagaaagtccaacgcagtcaggctcaggtttctcctccatgatggaggtgacatcagatcctccagcacggtgatagtggttttgactgaactgcttggagattacgtctggagatttcaaagatggttgagtttcaattcaaggagccaacgtcctgaattaagtgtttccttcagggattttctgtgtcaagatcaagagaaaaaagtgctgtggaggtgttttgattaatttgcatgctcaatttcttgggattcacgaagcttctatttctaaggttatttctcattattctccaacatgtacatttctctttagtcagtcccccttatcacagcgaatttgatcacactattcatcttaaattagattctttttctacacttttcgtttccaattactcaagtgatttctcacctctctgaaagcccagtttcatacaaagtcaatatcctgaagttcagcattacataatcttcaattatttcgagtggacaatataatgacagcattaagttgagaaatatctttaatgcaagattagcttgagagaaagagaagctctgcattttatacctgcttatctggtgaaatttttatgagtcactactaagaatcccagaagaaaatgatactcctgtttttatcagacaactttctggatataatgtgggcccagaatggcataccaacatcagcaaccagagctctaaaagctcttctaggctcccaaagactccagagcaagatgttatttttggtccctccaggccagtgacttccaatgggggaagagtttgcccccgaggggatgtttgacaatatctggagatattttttagttgacacaactggggagtggtcttgttattgatatatactgagtaatggccactgatgcttgctacgcatctgtccatgcacagaaaaggccttcgcctctcccaacaaagaattacctggccccgaatatcagtaacactgaagctgaggaaccctgccttagtctacatcaatactataaattccgtgccttatgaatatcaggtactcagtaaatgcttaaggaataaacacatgtataaattaaaggttctgaactagaataagtgtttacatttggtcactaatactcctttgttaacctgtttcaccctggatcttgccagcctgcctagacatacatacttagcatttcttcctgccatctctgacttcctcagactgcccagctccaacctcggtgtgttagattcctctccttcatggtccacgcctgctcaggcactcagtctccgacttgacagcctgctgagacagaagaccacagaagcagggtcagtagaagatctggaaccaggagcagcaacagtccccactacctattctaaacagtaacgtcacttgatgaatttcggcagttttcccattttatgccaggccctgttgatacaagtgctgtagctgtaatgaagttaaactcaatatattttttcctctagttataactggcaataattttgcaagttcccagctaccgtggaatccattcagggcaggcaaaaaaaaaagcaaacaaactccagtatgaaatgtaattgtggttgccacatgtgaaataggttagctaccaacatttcttgttacctttactctgtggacactggcttttgcttaaactaagtgtattttgctatttggaaatggagacaatgatctgggcattttattggaaaaaatggcttttcctggaataattcagattatagagacaaaatgatacttaaaatatgttgccaaagagtgtaccaacatttgacattcttaatctgagagatgtgaaaatacactatgtgcccaggtctgaaaatatgactagacatagttaattaatgcatgtatactatatataaacaaattgacctggctgtgtgctttatccatctaatcatcacggggaccctctgaggtatattatgatatcctcatttttatagttaagggtagtgagaatcggagaggttgaataacttctaagatcacatacatagcaaaggagacttcttaacttacaattagaatgaagatagataaaaagggttcattatattatagaaaaatattaaccattaaatttgaacacatttgacattagaagatgtccctaaaattttgacaataaatgcaggttttaattttccacagtgccaagttaccatcgttaaaattttgcatctgtctataacatctatgttattccttcagttaaacaactttgtagaagtatagtttttctcaaatttatagttctctctgatcctaacaaaaggaaattactattttaagtacttttcaaggtagaaaatttcttctctaaaaataatgtgtcaataacactgagccatgttctaatatcttttaagtatggacttgtccgtgcgaatactttactgtgtcattaggtggaaaccgtgggtcacttttaaacaaatatttggatgcaacttcatgagaaaaatgtttccagggttaagagatgatactctgaaaaaaaggaaaattcaaggtacttatagctactgaaaggttttttttttttccttaatggtacttaattcatgttgtaagtaaactgtatttatacaagcgaaagcacacattttatttaagtagaccaatttgcaaagagccctgtacatacatctgtaacgtactataaacatgaacatacagagtccttttatactacttctttttttatatatttttatttcgtatcaaggatttctactgacgtcaatggcagtctcagaattggaatgagtagtgtagattaaacattagtggctgagagaattttatctcatttgctaagaaaaatcttgcataagggatctaatcagttaatcttaattaaagaaatattacttgtttcggtctttccaattgggatgaacaacagcaacaatatgaaaaacttcttcaatatgaataacaggcttaaagtttcagacacttgaatgttttaattgggtggaaacctgtaataaattactttctatttcatcataatacagcttttttcaatgtccaaatattcattaccagaatttccacaattatatagggaagcaacataaaactcaagtcataaattcacatttgtattgactgaaaaaaattagtctccatttaaatacccttcccattttgaaactagcttttatccctgtctagtttagcaacatttgttaagacagtttcttagagctggtcagatgttgaaagtactcacaagatgcattgcattataaaatctgcatcgtatgtaggattttcactttcataatagggtattataacttgccgattaaaaatgtcttcattctttctggtttaaaaatagtctttttccatgtaaattagtctccgggaggcaagagactccatatttcctgtacctctgcccgaacttcttcaaattgtgtttggatgtataaagtgggtcaggaaaccaattcattgacatacacataccaggaaaaaggcctcagttaatctgcaccgcccccccaccctgccaaaaaagaatacctttttataatgctgaaggagtggaggtactgttaatgaaataatgtgccttatctgaaaaccctgccccatttctgatatggaagaaaatcaaaatgcgttcatactcttaacaataatgactgtcattgtagtcttcagatgggaaatttgcattagttataacagaactttgcagtaattttaataatacacagaagcattcatatgtatgagtggggcaaagtaaaataaattttatatgtgttacttctgactctttcttgtaatctatctgctattccagaagtagctacaaacttatgcttctagaaatagatattgtattgataattcaccccatccacactacctgttatcttgagaggaaaagaaaaataaatggctttgaaaccgatatggatcttgaagtaaaggagaattggttttcttacgcagaatccccagtgcgcagtgctgctaaggggaagcccacatttctgattttcactttgtatgaaaaaacaatatttttccttgatcattgtggtgagattgaagcaacaaatctcaccagcccgaatcaccaaactccccaccaccctttaccccataacgctgttcccttgcttccatgtgtttttttaccacccagcttatttgatcccctggaagatgaatggctttgactaaaaaaattaaacaatggcataacgaaaatgcaggatagggtaaacctcaccgtgctgcacaatttcctttcttttttcctgtttctgaggtcaggtctgggtggttttttttggggttttttttttgtttgttttttgttttttttggttttttttttttgtccatccactcatatttgctgtaattcttttaatcactgatgtttctttttaaaatttttgaaattatagtgatttgtcttttacagttttctgttcagtaggaagcagtgtaatgtctgaatgtttcactagatatactatgttagaatcttctattccagtattattattttttactactgagttctagttcccaggtctgtcactttaaaatattagttttctctctggtaaagtgaaagcaatagttgccctgcattgactcttagggtagccggggaagacacaaaattataattcacgtagaagcaacttgtaagccttaagatggactacatatgaaagaaattagactgaaaatataatttcctagcaaatgtattgcataggatattttaatataaaataatttatggaatacatgagtgggggaaaaggaagggaaataatagtaaggtctgttttagtgttccatgaagtattagctaattgatatggagatatctagttttttttaactggcaaatagtaattctgggtggctgtttttcaaatcttatataccaggacatataatttgaaaagaccaaatcctcattcgacgaaaaaataatttgccacctgtttgcctcaccctaaaaaatacaacatttaatgtactaaattgttcaacaaccaatacagtttctggagagcaattgagagcttctccatttgctcacagagcatacagattaaattatatttggtttggctgccagggtttatagaaagcagtaggtgccagggacaagggttggtgggactttatgatgatggtcaggtgcctgaagaggacagtacgttttccacaatggacactttaggggattattgaggaaaaacaacctagttggtttcctgggtgacctagatggtatgcagcccagcaatgagctgagctggatcaccagggaggggcatgaggcctttgatatacaatttcccccaaaattcggcatgcaaaaacaatcatgtttctcgttctagtatacctgaaaatgcaaacttgagctctcggaaatatgttggataatgcttgtttctttccagttcctctagacatatgcaaggaggcaggaatttagtgactacatttacataacaatgacccatgatgaggctagacatatcctacctaagcaaacttcttatggaatagtgaaagtttagaggccattatttaccctgcctgtcctgtgtctgcatatttctacttagagcttcaccttgtgttggaagcacttatctttctcataggcaagatacacatcatttatcccggggctgccttcagcaagcagcactatggttagcctgacccagcccaagagagagaaacacccttatgagtgtgaatggtttacatggtctaatttggatggggcatatttatgcactcaattgctgaaacaactagaccaaccaaatgagactgagatattcccagggatgtatgtcaagtaccattaccatatttggatgagtggtgtccattcattcatatacttttgaatacctggagtggtgagtcaactgagaagaaacctgggcaatgaagctgtggggatatttcatgtacagcagcttaatacttcctgggctagctgggaatgcaatagtacttgcaggcctgtgtgctcccacttttcgggaaacaaagaaacaaggaactctgagaagtaacctaagcctccatgtgagttagaaatgtaggagcaaaatttaggagcaaaaacaaataactgataaaaacttcctcttgaggcttcttcataaaaatccatatgccagccaggcggggtggctcacacctgtagtactagcgctttgggagaccaacacgagaggatggcttgagctcaagagtttgagaccagcctgggctgcatggcaaaaccccatctctccaaaaaaaaaaaattagctgggcatggtggcacacacctgtggtcccagctacttgggagactgaggcaggaggattgtttgagcctgggaggcagaggttgcagtgagccaagattatgtcattgcactccagcatgggtgacagagtgagaccttgtctcaaaaaaaaaaaaaaaaaatccatgtgcctataactcttagaaactgggatttaaaataaggaaactgaagagattaaaacataaatagaactactgagcaaatgtggaaaccagtggtacttaaggagatgaaagggaaaagactatcaaagagagatagaaggcaagtaagattaatctacaaactatcaatttaaaaaagatcaggatgaagtcttttaaagaatgtttgttgaaaaaaaaggatgtatagctagatgccttgattaaatcttcttggtcacattgactcaggtttccaagattaaggagctaagattactatgttccagaccaaaatcttctacttcattgtcaggattgtttatcaagtaaggagtaacagatattgatgagatgcagctgtatcacagaatgaccactagttatgtacccctgaggttgagggagctgtgtggtttaaagcaggggtccccaacccctgggccatggactgatactagtccatgacctgttaagaaccaggccacacggcaagaggtgaatgatgggtgagagagtgaagcttcatctgtatttacagccactccccattgctggcattactgactgagctccacctcctggcaaatccgcagtggcattagattgtctcgggagcacaaacccaattgtgaactgcacacgcgagggatctaggtcgtgtgcttcttatgagaatctaatgcctgatgatctgtcagtgtctcccatcaaccccagatgagaccatccaattgtagaaaataagcttagggctcccactgattctacatgatggtgaggtatataattatttcattatatattatgatgtaataatagaaataaaatgcacaataaatgtaatgcccttgagtcatcctgaaacccttcccctaccctggtctgtggaaaaattgtcttccatgaaactggtccctggtccaaaaaggttggagaccactggtttaaaaggtatgagtgttgaagggacctagaatttatggcttccctgaacaaagatgacccatgcctgcctgtatggtctctccagtcatacatgtcttccatatagggtgatgtgatgatggcaattgtacctggaaggtccatgaacactgcattgctatctctatatgagctctattgttgccagtctttattctttctcaataccaagtaaacttggtgctaggtgaagactattgtgtgtctcatgaatttgattgtcaacttgaactcaagactactattgttaggtataaaggagagaatagtcatataaaaaacctgtactacaagtcctgagaacagtgccagagatgatggagaaacaataatgaaaatgttctggctacattattttataattagaatatttcagaggggcatataggtggaaagaccaaagatgaaaatatgccttgtgtgaataaatggttcaacgtttttgagatgcagaaaatttagcatataaattctcagaaaaaaaaaaaattaaagcgatttatgtctgtataccctggagaggggaaaagaggtgggaagagctgccaactctaaaatgtacctcctaaatactggtgttatatgttttgcctagtatttgcttggtactccaaagaatctatttcaatagaaaaataatagaagttcaagacttacttaaacacctgtggtttggtggtttgggggttggctgaaacgtcgttttccatacaggtaatttaagtaaaaagaattctaggctgggcactgtggctcacgcctgtaagcccagcactttgggaggctgaggcgggcagatcatgaggttaggagttcaagaccagcctggccaagatggtaaaaccccgtctctactaaaaatacaaaagtagccgggcgtggtagcaggcacctgtaattccagctacttgggaggctgaggcaggagaattggttgaacctgggcggctgaggttgcagtgaggcaatattgcgccactgcactccagccttggtgatagagtgagactctgtctcaaaaaaacaaaaaaaaaaactaaatatctaaaagctgcacactggattctgttgctttggggttcattgctaaccattcatttatagcacatgtcctatggatagtttcctataagtcccattttgaaagcagttaactttgattacctttataagatatataaaacattggtggtgattcgggagactgttaaatgtcattagtgagactcacaaagccagagaaagacaagcaatatagacaaaatctaaactgaatcatatttcactattgacaagagctgggagccacatgccgagaatactatgaaaataatttggatagaatcaggcagtaaatattagattagtagcattccaacaagtaaataaataacttgcacagatttgaattaaaaaggaagtaggttagtgttgtaactttcattcagggattttgtgtcataaaagcagcccatctggaggacatgcacttggagtctgaatcttcacaatgatgcaataatgaccttaatcttccagcaaaggccaggtgaataattaccttgcaagtctgcattccagtcaaaaatctcctgtcaggaaagacttcagcctagtgagatggaatctaacattttaaaaatgatataaacatttgtataaatgatcaatctcttaattctgaaaatgctgagcagatctataaatatgcaaagtaaattgcacccatgatactaatccattttgtggaacaacctgtactggtattcacaggttttgtaatgtttaaagaaaatatgacttttaagataatgtaatagagtagccttggcattccaatttaaactaaataattgagtaactgatgtttgcactagaatattttatggattctttttatttcttctatatattagtaagttagaacatatgcaaacatttatttactgaagttgattttttaattggttcacaaatgaaagatagttacaaggattatggggaaaatatacatgctaattctccatttcaaggtgaggaacaagaaaaaggccacagttgctgagacagtggaaatccgatgtttagaaactaacctaacctagcaaactttagtcaaaattggagacttggtatttctaaaagtgttgtggttcctgacattctaactaattcaggcttaacaaagtacagaaaagcccttgatcccttatagtgtgaaaattagttgtttcctggtaaattcagttactatattcttttttattaaaatgatttatttgtaaagaaatcagattgagttatatttacaaaacatatttcaaaactatatgaaaatactttcatactaacatgtttctttttaaggtatggtaatgctgtatattgcaaaatcacagtttatacttgaatcactagaatttttgactcattttggtgaacttgattcactaaggttggaaaattacattttttaaaatggtggaagacaattgggtaaaaatgcttgtgttgtgaagttagatatttctctgttttcttataagtaaaatcaagaatttcaattagtagacattttaaacacttgctatgtctaacactgtgtgggttgttaattattttttttaatgtaccagtagtttcttttcttaaggaatttattattttgtacgcaacctagctatggctgaggactccataagaactgagattttaagagaacttggctaagtatttaatctgtattgtgaggttcaaaccaacttgggtttcatcatatgtatgcatttcgattattaagttgttaaatattttggagagttttgctctttagttttgcttttaagatgcaacagaaaagtcaatgtgttacatatgtttttgatatgtgtttgataaatttagaggaattaaattatacatggcatgattgcttaaggaaatttaaaattttcagcttgacttgatcaaacattgatcatagggtctcttgaaaatgattaagttttattcatgaaaagtttgtttatgaggttaacctgaaaagtttgtttatgaggttaacctggtcttaatggaaacgaatcttcttgtttgtttattttgtgtcttcagtacatttaatattaactctaaaactcgtcatcatatcttatcttttttattaataaaatcttagggacaacacaaaatttcttttcgtcaacagccattaaaaaatagcatttctttaaaaacaaaatcaggagttgcttataattggcaaaggtaaaaaaccgagtgattgtgttgactttttagagacatagtccatgacacagtagactcggagaccccatgtagttcccacttctggaattaaagaagcgggaggctttatgcaccccaatgtgcccttagaagccccaggatcatgttattacatcttcacctaaatctaaaagcaattcattcgaatgtctcattatcacaacacactcttacctttgttatcagtaacaggaaaaatgctatgctctagaatagtaacagaagatgcataagcaaggttatagactcagagctctctttagcatcattcatttgttcaacattctgtctcgtgctcccacagttggtgtgatactccattcatgggtctatctgggtcagcagaagtctagtacggctctgagtaatgaaataagcaagtgagggacaattgtatctcttcctggaagcttatcaatgtcacttacattcacctttacaaactccagaccaaacaactcatgatgcagatatctaaaaaccagagcagtggtgatctctttcctaagtctcttcccaacctcttatagttttgtttctctttggtagatgtttcctgattcttgaacaacgttccacagtgttgaaatcttcagtgacttacagaatgatgggcttttgtcagaacattcatttctttgcagccccaactacaaactatgtcagatgatggagacgctttttccccatgtttcttagtgcgttggaaatgtctagctcttgactttgctatagtgtccactttttccgaaactaaaaatccccatctttgcttcatcatcagtctactaattaaaagtttcaactatctaggcaatcacacttttctgggagtacatcatataaagctctgacttaaaacactcgattctaaaaacttcaacttcatttgctccttaagatcatggtgtattctgcaactttccaacagcaactatatctgccaaataagtgaaggagtgggaaacatctttatttaggctgaagccaacagaagaataatttacatatagttgcttgtaaaataaaagaaaacaggtttgagcagaattgaaataatataatagtatcattttatgcatacttaaaaatatctccttaagtagttttttgagcagtttcactcttgttgcccaggctgaagtacaatggcatgatctctgctcactgcaaccgcagcctcccgggttcaagtgattctcctgcctcagcctcctgagtagctgggattacaggcgtgcaccaccatgcccggctaatttttttgtatttttaatagagacagggtttcaccatgttggccagtctgttctcgaactcctgacctcaggtaatctgcctgcctaggcctcccaaagtgctgggattataggtgtgagcccccacgcctgggcttatgtagatttttaaatgcataaaaacaatagattggtgactgctaatacattcgccctattgctcaaagtcctggctactaaattaaggatataattcatgtgatattttatgtttaattcacaacttaaaattttgcattagacatttgtgtttgtttcaaatcttcagggagccaaaggctttctggccctgcctcttcactcaggcctcaaacttcacttccacagatgtgcctaaagcgatttgaaggatctgtcataccatactcctaatgaaaagcaaattagagaaggtgtggccttccacggctccttgcaggttgcctgcatattaatgaaaacagatctttttgacaccaaaaggcagcttacttcaagtctccggtcttgttccctccagattccttcaggctgtcagacttgcaatttgacaaaacaaagctaggctgaatattaacgtttcctttctcctcctttatctgaaccaacattttggaaaaagattcaaaatggtttctgacatcatctcattgctcaatattgaacaaccatttacatgaaactgaaagtaaatttcagtttcaaagaaaaggactgtttggggtataagagcaaattttataaaatgttgaattcacctttcacaaagactcagaatgatactctgcttactaaactagagatagtagtcatgaaaagaaatattgagatggaggaaggctactgaaaaagaaattgatagctcaatcaaaatgtaaagaagtcagagagtgttagatagactgcagagatgtgaagcaaagagaagctaaagaaattctttcagaatttgaagaaagaatgaagaaatgagtactacagaatgaagataaaagtcagagacaagaacagataaaaagagatccagtacacatataatagaaattgcaagctgggcgcggtggcttacacctgtaatcccagcactttgggaggccaaggtgggtggatcacctgaggtcaggagttcgatatcaggctggccaacatggtgaaaccccatctctactaaaaatacaaaaaaaaaaattatctgggcatagtggcgggcacctgtaatgccagctacttgggtggctaaggcaggagaattgcttgaacctaggaagcagaggttgcagtgagtggagatcacgccactgcactccagcctgggtgatcgagtgagactctgtctcaaaaacaaaacaaaacaaacaaacaaaaagaaattgcagaaaggaaaatacatagtatgcaaaacaaaagcaacacacaaaacagcaaaagaaaaatagtctccacagtgaaaatcagtgtgatccttaatcacagctaatgccaagaaatcacaacgaaaagctacagaacacataagaatacaaacatcatattcttttaaaaaatttcacagataaatgggaaaaaattataaaaacttacagataagcgtgtcaaagaaaaatacaaatgaaaacaaaaagtagatggacatgagatttctcctcccagaactaaatttcagggaataatgaagtgtaatataaagaaatgtaaggtttaaagaaagagactcaataattttctgtttatttaaactattgcttaggtgtaaagaaaatataagacattttcagaaatgcaagggatcagactaaacccaaattacccttcctgaaaaaagtactccacttgttgaaaaataaaccaagatgaaaaagacatgctagaagagaaataatgatgaacaatgaaaccactaaaatataacagaatcagttaatgcgcttatgacactttaggaaaatatacaagtaattattaaaagaatatgcaaaatgggaatatcttcagagagaacatacaataaaagactacaaaattttatatattattttattacatataaaatgatatataattataacattaaattgtataacatatatattaaattatataatatataatttaacatatacaataaaatacattttcgcaacagaggccacataaacagctttatccttattaagtacagagaaaaatgcattcatattatattgcacttatctgaatatttgcttacaagcaacaaaattcatatttgactaacttaggtggacaataaagttattgcaaggattttaggtagttctcatcattgacagaaagatggtagaagtcaattacacatgttccttgccgatactgtgttttcacaaattgaaggtttgtggcaatcctttgttgagcaagtctgttagcgctatttttccaataccatgtgctcactttgtgcctctgagtcacattttgataattcctatttagagctttttttcttttttaaaaaaacttttagtttcaggagtacacatgcaggtttgttaaatagataaactcacgtcacgggagtttgttgtacagattatttcatcacccaagtagtaagcctagtaccccatagttatttttctgttcctctccctcctcttaacctccacccttaagtaggccccagtgtctgtggtttccttctttgtgttcattagttgttatcctttagctcccacttaccaatgagaacatgtggtatttggttttctgttgctgcgtgggtttgctaaggatgatggcctccagctccacccatgttcccgcaaagaacatgatcttattcttttttctgactgtgcagtattccatagtgtgtatgtaccacattttctttatccagtctaccactgatgggtatttgggttgattccgtgtctttgctattgtgaatagtgctgcaatgaacattctcatgcatgtgtctttatggtagaatgctttatattactgtgggtatatacccagtaattgaattgctgtgtcaaatggtagttctgcattcagttctttgaggaattaccatactgctttccacaatgtttgaactagcttatgcttccaccaacagtgtgtaagggttcccttttctccacaacctggctggcatctgttattttttgaccttttaatagtagccattttgactggtgtaagatggtatctcattgtggttttgttttatatttctctaatgatcagtgatagtgtcctttttttccctatgcttgttggccacatgtgtgtcttcttttgagaagtgtctgttcatgtcctttgcccactttttaatggggttggttttcttttgtaaatttgtttaagtttgctatagatgctggatattagatctttttcagatgtatggtttgcaaatcttttctccctttgtccctttactctgttggcagcttcttttgctgtacagaagctcttaagtttaagtatatctcatttatcaatttttgcttttgttacaattgcttttggtgtcttcatcatgaaatcttcatcagttgctatgtccagaatgatactgcctaggctttcttctaggattgtcatagtttcaggttttacgtttaagtctttaatccatctcgagttcatttttgtgcaggtgtaaggaagggatccagtttcattcttttgcatatgcctatctagttatcccagcactatttattgaatagaggctccttccctcattgcttgtttttgtcagctttgttgaaaatcatacggttgtaggtgtgtggccttatttctgggctctgtattctgttccattggtctatgtgtctgttttgtaccagtaccatattgtttcagttactgtagccctgtagtatagtttcaagtcgagtaatgtgatgcctccagatttgttctttttgcttaggattgccttggctatccaggctcttctttggttccatttgaattttaagatagttttttttttttctagctctgtgaagaatatcattggtagtttgatgggaatagcattgactctgtaaattgcttgagctttttcgttatgattatatccattatggtaatctgtgatcagagatctttgatcttgttatagtaattgttttgaggtgccacaaaccctacccatgtaagacagtgaccttaattgaccaatgttgtatgtgttctaactgctccaatcactgcctgtttctccatctttctccctctccttgggcctccctatttccagaaataaaacaatattgaaatttggctaattaataactctacaatggcctgtaagtattcaagtgaaaggaagagtcgcttgcctctcactttaaatcaaaagctagaagtgattaaacttagggaggaaggcctgtcagaagctgagataggccaaaagctaggcctcctgcactagtttgaaaatttgtgaatgcaaagaaaatattcttaaaggaaattaaaaatgccactctaatgaacaaacaattgataagaaaaggaaacagctttattgctgatgtggagaaagtttgagtggtctggatagcagataaaaccagctaccacaccccctaaaatgaaagcctaattcagagcatggtcctaactctattaaattctatgaagacctaaagaggtgaagaagctgcagaagaaaagtttgaagctggcaagtgttggttcataaaatttatgaaactgtttctacaacataaaagtgcaaggtgaagcagcaggtactaatgtagaaggtgcagtaagttattcagaaaatctagctaagatagttgatggaagtgggtacactaaaaaaacaaattttcaaagtaggtaaaacagcataatattagaagagataccatctaggactttcacaactagagatgagaagtcaatacctggcttcaaagcttcaatacacagggcgagtcttttcttaaggggtaagcacagcttgtgacctttaagttgaagccgatacccatttagcaaatccaagggtctaaatttactctgcctgtgctcataagtgcaacaacaaagcctggaggacagcatatctgtttacatcatggcttgctgaatattttaagcccattgtttggagctactgctctgaaaaagaagatttgtttcaaaatattactgcttcttgaccatgtacccggtcacttaagaggtctgctgccaatatacaaggagatgaatgttgtttctacttctgctaatacaatattcactttgaagcctattgtcaaaggataattttgactttcaagtcttcctacctaaaaataaatttcataaggctataggtgccatattcctctgatggacctggccaaagtaaattgaaaatcttctggaaaggctttaccattctagataccattaagaacatttgtgattcatgggaggaggataaaatatcaaccttagcaggagctttgaagaagttgattccaaccctcatggatgactctgaggagttcgagacatcagtggaggaagtaacagcagatgtgatggaactagcaagagaactagaattagaagtggaggctgaagacgtggctgaatttctgcaatctcctgataaaattgtaatggataggagttgcttcttatgaataagcagagagttttttgaggtggaatccactcctgtgaacattatggaaataacaaaaaagaacttaaaatattacataaacttcttagttaataaagctgtggcaaggtttgagaggattgattccaacttgaaaattagttgtactgtgggtaaaatgctatcaaacatgcatttcggaaaggaagagtcaatcaatgcagtaaactttattgttgtcttattttaagaaactgtcacagccatgcaaactttcagcagccccttctctcatcaatcagcagccatcaacaatggggcatgacctgcaccagcaaaaggttatgactcaataatagctttgaagattgttagcatttttagcaatgaaatatttttaaccaaagtatgtacattgtttagatataatgctattgcacacttaatagactatggtgtagtacaaacataacttttagatgcactgggaaaccaaaaaatttgtgtgacttgtttgttgtgatatttgctttattgaggtggtctgggcctgaacccacaatatctctgaggtatgcccgcatgaccaatgccatgacatgtcatgagatgatttggacacctcccccagatcatcatcccatggcatttgccagcttggttggtgccattgcccctgataccgtcatcagctgtagggtcttaattacattgtagccactaggaaaaagctctgcctgaacctgcttgctgagagaatgaacaaatgtgcaaagccctcagtagggacatttaactggctagggcaaagacatttacctagctgccagaaagattcagctatcattgactctgccctgcacaccctctgactgggatgtttccaattgggaaaggataaaaggacgaaattctactccaggaaaatgaatatacagaagcgtatatataaaactgcacgtttttaaggtaaaatgaattggagtcctttgattaaaaaaaaaggaaaaaaatatatatcctatatattataatatgtaacctatctatatagacagatatatttaaatctagggctttagagcagcaaaaagtgagcactattctaggcatgatggttaaacgtattctgtgactctacacctaggaccacagtcacatctacatttggcttgaagaccagactcagagctgcaaaaatgaatgcttatgtctctaatataatgagccttcagattcaggttaacctaaaatgactcttttcccagtgaattttacctaaatgtcaaaagttatgtgtcaggactacctccaaatattttcattgccaccctgatctggcttagagacaagaacataacttatagaggctccagttgcagtaaacttacagtggatcacttttatttttataaggatttccctgccaagttctaaaacatggaaacttctattagcatgcttgagacggcacacagggcaagtgtttgagctaatggtatccttcttgacttatgctcctccatgcttttggaaattaaaaatggtcatgattagcaacttttaaaaatgttatctttattcctttgccagatcttcgaattttaaaatatcaagataatatccctccaattatttttctgttacttagatgattctgcagttgccttatgccttttcttccacacatccgttacacatttcagagaatctcatctccaaaagtaatttattcttttaaaatgtagatttaagcctgatgccaacccctacccccaattaaaaaaaagtcttcagagtggggaatttcaatattttttatttttattatcaaaactcaagaaaattgtgttaactcatattagggctataagacagtttctgagatgtggctgatgatggtttattcattattctacaaatatttattgaattgccactgtgtcatatatacttctaagtactgaaacacatcgttgtacaataaaagataaaaatccctgcttttatgcagcttacattccagtaaaggaaaaaaataaaatgaccaaattatacagcatgttgcaatatgttaattgatacggataaaaacaacgaagagaaaaagtttaagggaagagatttttacacttttaaacaaagtgattatgaaggccttactttaaaagcaactttaacacatggacttgaagaatatgagagagagtgcctgctttgtctggggaaggagctgtctggacagaagaaataggaagcttatggaaagactagaaagaagaatagctgaggaccagtgaagcattagaacagtgaacagagcaggtgagtgatgatgatgacggatccaaaaaattgtcaatgtgttttggttcagaaattatcatgtggtttccaataccaaggaatctggtacaggttaaatttctgtgttaaacttagcagagaagaggctttaaatcaaagaggaatcctccagctgttatatccaaggatgagatggtgccttgaatacggtagacctaaataaacgtgtactgcagtatctaaaatgaggctctatgtgcacaatgcaaagtaagaaactgacagaaaaaaagtgcacgtgtgtgtgtgtataatgctcacagtttttttcagatgatcgtaatagttttggatatacaaattctgaagcacaaacatcagtgctggtttaccgtgcataatgaaggggagatgatttgatatttggagtgagtagtgtctaaccaatattctggaaaagtagtctgaggcttgagggaaaggtctgagggatatatgcctggtgctgccctaagaatttgcaaaagatacatgcccagtaaaaaattcagttgcctcggtgtgtgatgtttaggacaaatgcctaatgcatgcggggcttaaaacctagatgacggttgatgggtgcggcaaaccaccatggcagatgtatacctatgtaacaaacctgcaagttctgcacacgtatcccagaacttaaagtataattaaaaagtaaagataaaatttcagttgcaaattgaaataaaatggaaacagttcacacagtctttactcctaatttagtagcaacactttctctcatccaagagtgtaactgtgtcagcattaatctaccctgtgtagcaggtgtcaataaatggttgtttaattaattaacctggttttgccatgcccagggaaagttctttgggacgctgagttccacacaacaaacaaccctgtcttgttctatgcttccaaacaaaagctttctgttaaggatggggactttgccaaattgagagctcccgttagtttttcttcttggttttatgagcccatgacccatcttgattctttcttgcctgatgaggttttgatagactatagattggcttacctgacctagaaacttgtgatttttactctggtagatatccataccaacctaaggggcctaaatccatgccaacccttgatgccctgatactggatcctacataaaaagagagtttgaacccagtatttctaagatcctgatgtttcaaaaacaatgctactttatcttatgaatcatttatcacttgctccttcaggcaggtaaatataatgaggctgacagcagccaaggccatgctgctcatcatacacaatcatgtcaacctgctgtgaaagtctgtgccattttccctccatcacatctgtcttgttctctttgccgaaagctgagttactacatcttggctgattcagaattttgtctagttctttccttacaggttccccattgtctctttgatactattttatacctaaaattcctctctatttgtttaatgcaaatcagaaacctaaggcaagggacagctggtcaccaaaatacattaaattcctatcactcaggaggtgctgggctatgtccccagtgtccatccctctatgttacctatacaaaactatacattaaatatcttggagatatttatgaatgattacatgagaaacagagataatatatgttcatatattgttgtgttggagctgataattgatagagcagaggttggacaaatattaacatctttctggcctcggtctttgatttgttcactatgttactatcttcctccctgaattattccagttttctgaagactttgttaggtttgatgctgtttattacaacagagaaagtcctctagctggcagagcaccttttccttgaatatgtctgggagttcagggtggagaattgttaagtgattcttgtgttgtggtcgcagtgatgttggaacacctgctcagcatcaaagtcctcattaccaaattttctttttctttttttttttttttttggtatacaaatttaagttttaattcagttagaatgacgaatttaaacttctgtttttattatttggtttaatgatattcttaaatagaaattttcacttagagtttattttaaaacatcacctgtatttgctcttatttcattaaatgatttctatttgaatttaactgtttggcatatggagtgaggtaggaattcaaactttttaaaaaattgtacatattgactttctaaacaattatcctcaaaatctaagggcttacaaccagtacagtactctctcaacaagctatattttagggtggataacctcacaaagtctttttgtgaatatttattttatatttaacaaatataactatacaagtatatataactacatatacatatatataatgtagttatattttactttataataggcttgggtacatatatatacaaatatgatatttcatctatccaccaaatagatcattctttactaaaatatgggtcttacaaaatgaaaaaggtaaaatgaatttatacataaaattatagtcttataattttatatttaatgtagttaactaaaaatctgtcagatattctatgttcaattatgattttttttcaaatcttttaagaaagttggtttcatggtctatttcaggaaccaacccaaacaaatataaagtttagataaatggaccttattacttgaaatgatatattctatccttttaaaacagagttggatactgtatatacgttatctcatctcacttaataacataaaccgacataacagaatcttttagtaaaataacaacctttccaattcatcatccaaaatgcaaactaaaagcatgtttttttttagggttcacatataaattgatctcaaaagatgattttttaatttctaataatatcctaatatattatccttcacaaaatctaagtgctctgtaaaacagacttaacagttattctcatcttacgctgacaaactttcagaattttacataaaggtatctcaaataattgaactaaatttacctattttcaagacttaaaatcagaatcacttctgatcatctgaactttttttctttagttgtttctctttattagaagtgtactaggaactatagaaaagaaaaatacctgctatgttactaatatttcatgtatacttcatctaatatgtagaaatgtattaaaacgaataagcatctaatatccaagatgagttctgaaaatgaaagcaagtctctaccccccaaaaaattaagcagataaaccaaaatttccacccttttatgatgtcagttttaaccctaataaaatagattccataatttgcagtgccctcagtcaggtcttaagtttaaaaaacaggtaaaataagtgaaaatatttgtatgaatgtttgctcaaatagtttctaaaagagaaagcaaaattaccactttatacagaaataaatggtgtatttgactacattcttgcaatttgaatgggaaaaaatcatattacaaagactatcttgaacatcctttaaattgttttttcttccttttcttttcccagccctgtgttttaaattaaccaagagaaataaaaggaagaactggagggaaagccagtgcattgtgacagcatgattttattttatgtatgagtctgagtgagattttagaaaatggatactgtatttcttaaatgggtctgtgttggtcaaagaccattaggcaactttggaagattccacagggacacctggggccagacattgcaatcccaatggactgagtccactgtttgtctttctgcatggagaattaataaatgtatcaatcttctaccagtggccctgaactagggaacataaaggaaatagaacaagtgggaacaaaattgcacgtgtgccttttccttcccccacctcctgatcttcacttttctgtgtgttgaacttattttcccttcagattttttcacattattctttttttctatgttattagttatgtctcttagcattcctggctgcattgcactttgtctgccttaaaatgatgtctcctaacctggacaggggctataatttaatgaagttggccacctttgcataccttctgctcagaagatcagtcggtggccttgaagtgtcagatttcattaaatgattttagtttcaaggagaaaaaaattcaatggaaagttaaggaaaccagtcaggaaatatgcatggtgccaacagcttcagagcacaggattccaaaagtcattttaacatttctgaactgataagctaattaattattaaaacagaaacactcctaggatacctatgaccaaggttataaatacacccctttcaattcctctttctttttcttaactgcaaaatgttgcctttaaattgcaccacggtgattctaagaagtcaattagaaaggtttcaaatcacagcagttagaggagctaagaggaaacataaattgcattaccaaaaaaagggagccgagagcttacaagatttttaacgttttattttttgctttatatcaactggtctaaagcacaactgaagcaaaatttagaaacattgtgactggttttctttttatagcaatagaactttctctccaccactttgcttaaaaccacagtagttgcttcatcattcctttaaaaaacagctggagggtaagggtaatgatagtgactatacaacaaatcaaacatttctgtgaattgcctgcttattgacaagagtttatttgtatgggtttgtcttttttttttttttccccccgagacggagctctgtcgcccaggctggagtgcagtggcgccgtctctgctgactgcaacctttgcctcctgggttcaagcaattctcccgcctcagcctccccagtagctgggattgagaggtgaagctggctgggcttctgggtcgggtggggacttggagaacttttctgtctagctaaaggattgtaaatgcaccaatcagcgctctgcgtcgagctaaagttttgtaaacgcaccaatcagcactctgtaaaaacggaccaatcagcactctgtaaaatggaccaatgagcattctgtataagggaccaatcagcaggatgtgggtggggccaaataagggaataaaagctggccacctcaaccagcctgggcaacttgcttgggtcccctagcagaatgtggaagctttgttctttcactcttcacaataagtctggctgctgattgctctaggtgcccactaagtttatgagctgtaatgcccaggtctggggcttcactcctgaagtcagtgagaccagaacccacggggaggaacaaacaactccaactccggccctgccacgtttaagagctgtaacactcactgtgaaggtctgcagcttggttccggaagccaagcaagaccacgaacccactggaaggaagaaactctggacacaccatctgtaagagctgtaacactcaccgccagggtccgtggattcattcttgaagtcagcgagaccaagaacccactggaaggaaccaattcctgacacaggattacaggcgcccgccaccatgcgtagctaatttttgtacgtttttagtaaaaatggggtttcaccacgttggccaactacgtctcgagctcctgcccttgtgatctgcctaccttggcctcccaaagtgctgggattacaggcatgagccaccacgcctggccaggtttgtcttcttaaaattcccttttgggactctgtttttctttaggtaaatgcagtggttagtcatttaggtgagaaaagaggtgccagatgagacaaaggcaggagcagaacaaatccaagagctgacttgcgctgcatcagaaaatatttgtgtattctgttgtcctcctgaagggaggggaaaagcaagctaattatccatattagaacctagaggtcaagtttattgaaatgagcaagggactttgaagcacagaactagttgcattagtctattctcccactgctgtaaagaaatacctgagacagggtaatttctaaagaaaagaggtttaattgactcacagttttacaggccgtacaggaagcatggctggggaggcttcaggaaatacatgatcatggcagaaggcaaaggggaagcaacacatgttacatggtgggagctggaggaagagagagaatgaaggagctcttttgctgagcgcacactccatgtggctgtgtgtggcatggtgtccctctcccctggtctgtgagtatatgtgactaatacactgctgttgatctcacttgtccagtgtgaagtattagtattttgccattcccataacactatagagaaatcctttcctcaccaatggaatgaataggaggcaattttaaaatgaggaattacaacatagtgtgtgaggcaagatatatgcaagaatcaataatataattaggagtgtccaagcaagtggtaaattatgtgatactaactgaaagtactatggaagttcagaaatgtttgtatgcataagtaattttagtttagtaaacaaaatatttaatgaaaaaaagtttaaagactttgaaataggaataaaacaaccacatctcatgagaactctatcatgagacagcattagggcgatggtgctaaaccattagaaaccacccccacgatccaatcacctcccaccaggatcacaatacaacaggagatttgggtggggacacagagccaaaccatatcgctgatactcttcagttttattttcttggcatcagtatgatacaaacatttctacccaccccatatttttaaaccttattatataaaacagccttttattatcagtttagttttctgtgttttaattttttttggggggggggggaattttttttttttttttagaagtaagtgataaatgatgagtcctccacctgttgacagctaaaaaaggatggcacaccgtatcgggcaggttccagacggaatattagtttgtttgtttgtttttaacaggatttaatacaaagaatcaattatttggtatgggaggatagaaaaggcaaaggggaaacactgagatgatactgtcagaaaagattatcaaagtgaaattgtgctaaacacttgttaacatggacaagacagactttattcgggttatagcaataaaggagggagacttcagaacaggactgaattcagccctcccactttttgtttctgcagaaataggagggtttttaatttctgggataaactagtggaaatgtagctggaaggggaagttggtcaagtcgttagagcatctgtgtttgctaattgttgtttgttcaggttagccgcctaccctcccacaaagaatgggaaaaagggacacttgtcttccttaatgattagatttcaaagggggtggctcccatgtctttgagaaagacatttctgggctgtaaaaggggcagagaaagattttaccgttgctagtattttactgtaaatactctaagaaaagagaggtcagaagcttatggtcatgatgtaatctgtctaaagtttagtgaaggtgagaggaatgtgaaggccatcttggtcaagatgcaggaagaaagggaagaagttgttgaacattttcaaatactagaagtttggaggagaagactgggcagctgggacctacacaaggagaagaggacgtatttcagctccatacctctagaattcataggagagagctcctgaaagtgaaagcttctactcagacgtctaagaaggggtgctgtctggtggatagctctgagggaaccttctgagcgggttctgggagttctaatgaaggtggaaactagacccagcaagccagatgaagctgggagctgtgtgagtacatgctgctgttggcatgaagacctgttatgggagtggtgcttttaacaacagggagcaaacagaactcatgagtccccaggcttccagtctccccttagtgccatctactgcattatatgtagcagacaggcagatggcaaaggagaaatatggtctgcacaatatcacagggcagaatattaaaaagtggacttggagatgagaaacaagaacttaatatttggctgtataccaaggtggcagaccatctacacactgaatcaagacagtagaaccgggatctaaaaaccgaatagggattgggaaagcaaaatgtgtgtcccaacccctgattccaggtaggggctagaaacaatattaggaacttctcttcaaaaggaatagagtttgaatcctcatttgaatctcaaaagataggcatatctgcctgggtacagtcaggagccaaaaagtacactatgataaaaaaaaaaaatagaactcattagcctttctttaaaatttgggcaaatagacaatggaaattagaaaagtgagctttattacaggtgtgagccactgctcccagcctatatgcatatatttttaatttacataaatagaaaaaaaaaagaaaagtgggctttaaagtgcttctaaatgctttttataactcaaacctaaaattgagttctggaagcagaaggcagagattggggctgataatcatctacagtcttttacatttcaccccatgggagacactgacattatgtttagtgatgttttctgtgttgagatatttaaattttatttttctatacattcaaatgcagcagtgtttacaaataattcacaaatatgccctttttaatgtagagtttcctgttttttcgtcttgttttccgtttatcctggaaaattcttttagcatggatggataaataatatttgcagcagttaattttttgagtacttaccatgcatgagccacaaaatgttataataacacttagtatgaattgactcatttagttctcatatcacctatctatggggtcattactatctctctaatttatagacaaggaaaattagaacaagtaacatgaagtagtaatttgcgtaagatcccacaataaatctaagtctagcgagtgtgtatgtttgacatgctactacctctaatcatgaatatgtattaacacatttccatgcatctggctcaatattaagcttttgtataaatcatcttatatattcttcacagaattcctacatggcagaaaccattatctctcttatgagaatgagaaaattaccaccaagaaagataagtcatatagttaataaacagtgaaggaaatatatgagcctggagaaattgcctgtagaatccaacccattgatcaatctgctatatcaaaataaacagccaaagaaaaatctaatggaatctttcagaaatattatctgtcagttaagcaagaaaaagaatagccatcatttctgttttggttttaggaatggaacaacacacactgggtcttatcagagagtggagggtgggaggaaggagaggatcaggaaaaataactattgggtactaggtttaataccttggtgatgaagtaatctgtacaataaacccccatgacacaagtttactcatgtaacaaatctgctgatatactcctgaacttaagaaaattcttatgtttagaatgaataacactcttgtccatagaagtaacatttatatgatagtaaatcagtgttgcttcatttaaaaataatctcaaggaaattggaacaaaggggaaaacaaactagaaagggtattgattatccgcagagggtactgagatatgtattattgttgtcaacagtaaacaagcctggtgcttctcaatcagtctcttcttatgtgcagcacaaaagaaaatttcaagatgggattatataatgtattgaattagtcatcagataaactatagctctggaattatagtatcccacccctcatcttcaattttgctttccatggtttcagttacttgtgatcaaccatagtaaaaaaacattacatagaaaatttcagtaataagtaattcatatgttttaaattgtgtgccattctcaagagtgtgatgaactctcatgccacaccactccgtcctgcccaggatgtaaagcatccctttgtcccgcatatccatgttgtatgggccatcttcaagttagtcacttaattgtgtcttgtttatcagatcaaaataaacatgtatacagatgctgcttgacttatgatggggttatgtccagataaatccattatacactgaaattattaagtaaaaatgcgtttaatacacctaaactaccaaacatcatagatcaatcttgcctaccttaaatgtgctcagaacacttacattagcctagttaggcaaaatcatctagggcaaagaatactttataataaaatgttgactatctcatgattcattgaattctgtactgaagagaaaaacagaatgcttttgcaccatagtaaagtggaaaaatcattaagttgaaccctcataagttagggactctgtgtataaagttcggtattatctgcagtttcatgcatccactaggggttttggatagagggggaccactgtctatagagaagttagatcttcattacctagcaaaaaagacatttaagaaaagaccagaagcttcatgggaagaaatgatgaagcagtaagagaggtatgacgaagagactctagaatctcaattcacaagccccagaaaggatcacagaatgttaaggcagtttccctgattctagcccattctcttctagagcgtccttcccgtaggctgtgctttctgcaggctttccaatacccaaggaagtcatgttttctttctcttttggcatcttgtagatttaatgttcatctgttgaggcacattgaggtgatttgccaaataactccttttggcaaaagaaatgtgctcggtcattattctttactccgaatgagccagactgactgtccatactgtgggaatatgccagataattactttaaccacgtctttccctttagctgtgtatacatggtcctcatattctagatacacttggttaaacctcgtattgaataattactggcaagtagccatgtgctcagagtaatttaatgttcatcttgggtttctacagggtgctagtgacaaaagctggttttgtttatgcatacgttagaaggattttcttttcacaattcaaagaaaatctacaaaacatgaaaaaaaaagtacttgattttttaaaaagcgtttttgattctaagttttcctcgggaatcacagatacagcgctgagaaaaagctgatgtagtttaacttttaaaaacaaagtctctataaaagggtaccacatgttctcactgccttgcaagttaagcagttgttattacatttaaatcatatctgacataatgttgctttcccttttgaaagtgaggaccaatgttgctgcattttattacaaaaggtaaacagtttgaattcccatgaatcactataccttgtagtcctatcgtaattgaaaatgccttggagtaggaggcaggagctagagatccaaattccgaccgtgttatttattagtcttggaaccagaagcaagaaatttaacatccctcttccttcgcttgtgaaaatggaaataatatcatcctaatcttgcaaagcatgtttatgaagcataaattaaatcatatacaaacttttgttataaactgtagagcatgaaaagttctgcacctaaaggacagaaaagatattttaaccagtttaagatttgtacacttcttaagagccaaaaaaacccactaggaattccagagagaagatagagaaacatgaatagaacacaaatttgcaataggtactccaaactttgaaaatgctgatacatttggacccagaatttttcatctgggaactctcataagactaccatgatgaatactatcttaataaatatagtaaaatatcctaatatctaaatgtccaatattaggaggatggttaagtaaattatgatatatggtgtctcttacacaggagtaatatttacataattatataaatgaaataggaaattctttgtcaaaatgtttagccaatatttaggagccagcaataatatctatcatcacgatgtaaactatgaaaaaattatcagataaaacaaaattccacagttgcctctgaatgttgggattatgggaatatttgtcaggttgtctttctttcttttttttttgttttttggtttttcctttattttctttttttattattattatacttttagggtacatgtgcacaacgtgcaggtttgtgacatatgtatacatgtgccatgttggtgtgctgcacccatcaactcatttagcattaggtatatctcccaatgctatccctcccccctccccccaccccacaacagtccccggtgtgtgatgttccccttcctatgtccatgtgttctcattgtccaattcccacctatgagtgagaacatgtggtgtttggttttttgtccttgcgatagtttgctgagaatgatggtttccagcttcatccatgtccctacaaaggacacaaactcatcattttttatggctgcatagtattccatggtgtatatgtaccacattttcttaatccagtctatcattgttggatatttgggttggttccaagcctttgctattgtgaatagtgtcgcaataaacatacgtgtgcatgtgtctttatagcagcatgatttacaagcctttgggtatatacccagtaatgggatggctgggtcaaatggtatttctagttctagatccctgaggaatcaccacaccaacttccacaatggttgaactagtttacagtcccaccaacagtgtaaaagtgttcctatttctccacatcctctccagcacctgttgttttctgacttttttaatgatcgccattctaactggtgtgagatggtatctcattgtggttttgatttgcatttctctgatggcctgtgatgatgagcattttactgtatgtatgtatgtatttaatttctttgtgtttggtcatgaaggttattgtagaaaacctgcaaacccttaagaaagacagtaaaatgggacggccattttttctatggtaaatagtgagctctgtggtcacaatgatctcatgaaattttgagacatttcagtaatgaatactcctcgcttttgataaatcagttatcactggtgctttctggaaatttcatattatccattatttggatgcaagattttttattctttacagtatctgaagaagcacgattccctaccagaacattaacaatagttatttggaaatctccgctcttattttaaacactattctgcaataaactacttggaaaagtgggcagatcagaatctcctaacataatgttgacattttttaatagctgttttggttactgatataagctttataagagtgattagaagtacaaaacttacattgacatctttgtatctcagtttatgaagaaagccaaactgaagtttatagcaatgtgttttattttcagttacacattaatattattgatttattacctaaatatactagaaaaattacatattctattttttggaggggttactgagacaacatttcgtctcttttctgttatgcaaaaacctctttggggaaaatgtattgtagccatggttatagaaacctgttaatgtggatctatggggacttgttcatcaacatcatctatgcatcgaagtcatcttagtttttttagaagtgagttaaaaatctattcagacacattttctggttaagaacaacaacaaagaaaacactttatgttcccaacactgtttcctcttcccagaacccactggaagactacatttcttaccctcccagccttccttgtatttttgttagaacaattttcctagcaggtaaaatgtggaccgaagtggtgttaatcctactgggcaacatgtaaaaaccattcttcagcatctttcagactcctcttcctcttccatagtgtccatgaaagccaagacttccatcgggcccagtagcaacatggtcttggaagcaatccactaggaaagcttccagattggcctcgaaagaaattcttactgtgctgacgcattgagagtcagcatttctttatctttcagcatagtatactgtcctaacacctataagcactttattttataagttgatattaactctattatcaactaatttgatagtcaaagaatatggatttgcctttatttgggaatagtttcccctctttcatattccagccagaaaatatagtctcattcaagaatgttttgtcaaatggtcaattaaaaataataccattgataaaaataaacttaaatatgagtctattgatgattacctataatgcatggactgcttcaatttcaccaagtacttaaaattttatctctctctctctcttttttttttttgagatggagtctcactctgtcgccaggctagagtgcagtggcaagatcttcgctcactgcaacctctgcctccctggttcaagtgattctcctgcctcagcctcccaagtagctgggactacaggcacgtgccaccacgccccgcgaatttctgtatttttagtagagacggggtttcaccatgttggccaggatggtctcgatctcttgacctcatgatctgcccgcctcggcctcccaaagtgctgatattacaggcatgagccactgcacccggcccaaaattttatctttgaattacattagtctaggggaggtctatattcttcccccaataattttggctcctcatagaattgcttttactgagctgagcattgaatgtacacttctttgcttttctgaggaatattagaaaaatacagccctctgttgtatgggaaagacagggtccactatactgtgatttactctagtgtatcatctgtaactatacagcagtggctcctctcttagtgccattctgcagtatttctttctaattgtgttgttccaaaatctgtactcctcttcaaagtttatttttaaataatggacactatgaccctatttaagtctttgttttgattggtgggattctcatagccatatttgtaatcaaccactagatgtaaaagctgatttgacatttttttttcctgtgaactttgtcctttattttactttatttttctatttgtatttccccatatccataactgttcatatattttaatttacttttgtttatttttttatatatttctctctaggccctctaataattattttgttttggtgacagtgctggttttagttttcataacctagataattgaagaagggtaaagtttgaaacacaaaaattagtcataatatatagtgaattacatatatataaatataatgaaattcagtctacaaaacactagacaagcttggtggtggttgggagcataatagcaagtcttcctaaattatttaattacatatttatttatacatttgatttttgatcatgaaaattaaaaatttaacaacaaatttctaaatgaaatggtctatttaattcttgatccagttgaaatactgtgcaaagttaatgattacatagaatatatctggaatagcaaacagctctagaggaataatcttgtttaaagaaaaagtagaatgcttcataatctgttaaagcacagattataaccaaatttgttatattatagatttaaaaaccacgtttcacaaatatagctcattccatcaaaacacataatgcttccaatacgtcattggtaaaacaataaaattactcccgtcctctcttggagtaaagaatgcccaattttgcatatttatatgaaaaaataaaaaatcaaaatgagaattcactgttttactttctactcctagaaggtaacaggctgagaacaaacaacgtcacttgttattattattttcaaaaacactatgcaaaaaaagcatagaactccagatttccaccttataaaatatactatcattcatagcatggtcaacactgtcccctgaaaaaaataacgttaatgtcaaaacgtgaaaaccaccattaaaatgctaaaacctatagccattgattctaagttctacaatttctccacctgaagtttcattattttcaaatatttccatctttcttcaatggaaaaattaaggcaatatctttcaattaaaagcttaaattaatgactacagtgaaagcataactaaggcatttgatgtttttctctctgccaccagtctcctgaacttattataatatgaactatcatctctctttaataagcatctgcatatattgaacccattttgtatgttttggtgggagggagataatgggggaaaaagtgagacagattcccaagatacaatttcatctaatttgggctatgtctctattactttttataaataaatacagttaaaaatgcaatgagaccaggcaaggtggctcacacctgtagtcccactattttgggaggccgaggccggtgggtcacctgaagtcaggagtttgagaccagcctaggcaacatggtgaaaccccatgtctactaaaaatacaaaaatacaaaaaattggctgggtgtggtggtgtctgtaatcccagctactcaggaggctgaggaaggagaatcacttgaacccgggaggaggaggttgccgtgagtcaagatcatgccattgcactccagcctgggcaacaagagaaaaactctgtctcaaaaaaaaaaaaaaaaaaatgcagtgacacttttgtattagctaatcaaatacaaaattcgattgaaaatgctttgggtttataagacatcagttatctctcttattgttatttcctaaatgtaatgtgtctacttttctcagatttctttcaaaatatttttcttatctatgattttctgcatttgactatgctacatgtaggaattatgggtttttatttgttggttttatttttgtatttatcgtgtttgggatttcctgagcttctgagatgtgtgctgatttcaatcactacatatagaaaaattttcacaagtatgtcttcaaatacttccttgcccatgctctctcgcttcagggacaccagttatatgtttagattatttgacatggtcctaacatgtctatttaaaatctgtttaaaatcatctgtttaaaatcatctgataaatttttaatttcagatattgcatttttttctcctagaatttcaattctgtcattttttagggcttttaccattcggtaaattatttgcctgttagttatttgacatatttagatttgtttaagtcctgtgtattaactaaaacatccagttcatctttgtgtatgcccgtatttgctgtttttttttttttcatttttgggtcagtttaacctctttttgtatgtcttttgatttctgcttatatgcaggacattttgaacaaaaatatagaatagactgaactagacaacaggttttgttttctttcttccagagtttccataccttttccctttcaggcagctagggtgaaggattgaatgtttagattttaccatgagtagagctagactagcattgggtcatttaactagtgtaaagtttaaactgcaattaaagagatctatatttctccttcctctcagtccataacaccctgtgttgtagcaaagggggttgagcattttgatcctaccaagatttgaacgggcacacagctgagttgcagcgtgagttttagtttacctctttattcaactctagcagtgtccgggctcaggcactatgtgagcctgtactgtttttctctgttctctcactcttcccattgatatatactcagcaaaatactcatgagagatcattgtcagatgagagatttatgtttgcttttggagatcttttaaattccaatccatcatgtcaacccatacagtgcttaaatttcagctggtttctcgtggtctcatggactattttctgattatcaggcctgcctctccctctgctgctcatgctaagactaaaatattgctccaagtacaaaagaagcccctgctttttgcttacctatgaagaactcctcatccttttttgtaatttagttatttcaggcttctttgcatccaccgttctaagtatgactgttagttagtctggtattgtgatagaagtaattgtctctaacagactgctactttctactgtaagtggaacttagaacataattaaggatttaaaatttcactctgttgccttttagtatagtgaatttcccatgtttctccccaattatacataccctgaagcctttcattcatccattcattcatttgatcgttagtttattctttcatttgttctgtcccataaaaaattacccatggcatactcactaaacttcagaggatttacacagttccaggaaacatatctccaaccataaagcatttacagtgttatctgggccagggatcagcaactgatgaaaaccaaagcaaaataattctatctctaagaatttataattgaaacagaaatggattcattttctgaatctatttttgaaggcttttgaatatgcacactttgcagctgtgagcaaacatcttccacatttgcagtagaaatattatttaaaaaacagacaagaattttctggtcttctaataaagaacaatgaggcgaatgcacaaagggaattttagttaaagaattcatggacttcaatgacatgattctaggtcttcctgagagccagtcatatcaaatatctttgtgtttttagatgaatccatcattttttttcttcttcatcttcttcacatattggctgactttcatttattgaagacttgaagttaatactttctaatacagattaataagacatatatacaaattaacaatttagtaggaagtggaaatggatgacagaaaacaagagggaggtcggggggagagagaaagagagagagaggttccatctagatatttgtgaatatagatatataattatttatactgaggtaatggctaattgatctctcataaacattcacaaaatagaaccgtggttcccatccacaaaatatactcctcctctggcagttatgggaactgtcattcatctggttgctcaggcaaaacaatcaacataattatcaacataattctggttaagtctatttttgtcattcccacatgtaatacaccaacaagccatgtgggctctatccccaaagcctagcttaaatctaatcacctcttactaattctttggctatcatcctaaattcacgctgccatcatctctgtctggactcttaccatattttaatatttctcccaaccattctattctgtacacagcaatgaacatggtcttttaagaatgtcaatcaaattgcttaagtctcttgctaaagcttttcatttatactcgcaataaaaaggaaattccttagtgtggccttcaagattttataccacatatttcccttgactctttctctctttaactatgaatacagctacactgaccttctgactggttatccaccatatcaagtttgtttctgtcttacaagctttattcatgtttctctttctgcctagcaagctcttccctcctcagtctcagtccttaccctgctgtgattgttcatattgagtgtcaacttgattggattgaaggatgcaaagtattgttcctggatgtgcttgtgaaggtgtagccaaaggagattaacatttgagtcagtggactgggagaggcagacccaccctcaatctgggtggacaccatctaatcagctgccagcatggctaagaataaagcaggcagaaggaggtagaaagagcagacctgctgagtcttccaggcttcatctttctcccatgctggatgcttcctgccctcaaacattgaactccaagttcttcagcttttggactcttggacttagaccagtggtttgccaggggctcttgggctttcggccacagactgaagcttcactgttggctcccctacttttgagcttttgggactcggactggcttccttgcccctcagcttgccgacagcctattgtgggacttcaccttgtgatcgcgtgagtcaattctcccaataaacccctttcatatatacatatgtcttattggtttggtccctttagagaaccctgacttactacatctacttagccctcctttacaatttagccctctgtataattctcactctttcagagcagccgttcctgacagtcattctagaccagaaattctcatctcctctgctttgttttcttctgatttattcctgtgctttattgtcttcattgcattctctctatctgaaattacagtatgtatttgtctatttgattattgtgtatctcctttactagaaggcaaactccttaagagcagggatcttgagcatcttccttctttgttctcaagctggaacactgtttagtacattgtagaacttggtgaatttcagattgagtgaatgaaggtattttatgtaggcaggaaaaccaagcaaagtcatgaaggtaaaacaatgtgtgttgtaggcagacagtggcaaacagtttttctcagtttgagaaaaggctatatggagaaaagaaatggcaaagtaaatcgcaaagggagcttatggccacgtggtagatcaatgtgaaggcaacagcaatagctcatcaaaattcaaatgaggaaccccttgttcaatcacatattgctttatatagctatgacacaatattaagggaaactatgatattaatgcactgcctaaatcattgagagtaacatcaaggaagacttattttagaataatgtaattctgagatgtcaagtcagttttccatgaaatgtcccaacagtttcataaaaaattctgggctaaggaaatgacatgcccatgtttaatatggacaaaatagataaatatgtacatgatattttaatataaagtgagttcataaatacagtgtctttggggataactgcttagttcatttaaagaacttcaaccggaatgttaataatgtacttcatctccaggaaaacaagtatatactgtatcacataacttcaagtatccatagtaacatgagtcatgttgattagatataataattatcatttctcaagaagattatagcacgataattgttttataccagatttttcttgttgccagttaagtaacttaatgtaagaaaaattgggaaaacaacactgactttgagaaaggaaagagcaattccttcaatatgtattctaatatggaaagcatctctatttaaaattaccagctttaatttagggtcacaattaagctgaaataattcttaacaataacaaacagtccaactctctgagcaagttgtacaaaagaaccaggaacatttagattcttgttataatcacaatcaatgtgaacctgctgtgtttgttaagaaatgtagaccattcaaataaacattataaattctactgtggagatgcttccaacatagatgtaattggtaaggtcaaactggatggtccattgactttagatggtcagataggtgtcccagaaattaaaaaatactttgtaaaacaacagtcaaaattccttaggctaagtatgaaccaattaatggagtaagcatttgtagcaaaaaagtggtatagagcacagttccaaaaatactataatccagaaaggaagttcatattaagtttccaagaatgtttaatttttttaaatttctactttttgttggtacatagtagattatatatttacagggcacatgaggtgtttcgatacaggcctccagtgcataataatcacatcatcgagaatggaatatccattcccttgtgcatctatcctttgtgttacaaataattcaattacactgtttaagttgctttaaaatgggcaatttttattgactatagttatcctgctgtgctatcagatagtaagtcttatttattctttctgtgttttttgtacccattaactatccccaccttcccccaacaccacactatgcttccaaacctctggtaaacatccttctacctatgttcatgagttcaattgttttgattttgagatctcacaaattagtaagaacatgcaatgtttatctttctgtgcctggtttatttcacttaacacaatgacctccactttcatgcatgttgttgcaagtgacaggacctcattcatttttatggctgaatagtactccattatgtctatgtaccacattttctttatccattcatctgttgatgaacacataggttgcttccaaaccttaggtatggtgaacagtgctgcaacaaacataggagtgcagatatctctttgatgtactgatttcttttgggaatgtacccagcagtgggattgctggatcatatggagctctagttttaggttttttttttgttttttgttttttttaaggaacctccaaactgttctccaaagtggttgtactaatttacattcccacctgcattgtatgagggttaccttttttccacatccttgccagcatttgcttttgcctgtcttttagatgtaagccattttaatgggggtaagatgatatttcattgcagttttgatttgcttttatttctctggtgatcagtgatgttgagcaccttttcacatgtctgtttgccatatgtttgccagactattttcctactgagttgtttgaactcctgatatattttggctgtgtccccacccaaatctcatcttgaattgtagttcccataatccccatgtgttgtgggagggacttggtgggaggtagttgaatcatgggggtggttacccccatgctactgttcttatgagtgagttctcacaagatctgatggctttataaggggcttttccccattttgctaggcacttttccttcctgccaccatgtgaagaaggacaaaatttagccaggcatggtggtgggtgcccataatcccagttactggggaggctgaggcacgagaatcacttgaactgaggaggcagaggccgcagtgagctgagatcctgccactgcactccagctggggtgacagagcgagactctgtctaaaaaaaaaaaaagatgtttacctcaggagacagtctaagctcatcccgaggtaccataaggacataattctctgaaacgaaactcacataagatcatttcaaattcaaaagatactggctcctctgctccagtggagaaggggaactaggtatatgcatttggctgtaactgagcagagaagctgaggctacctctcaattgaagctctcttcatatagagagcaaatgccaaacactgtcttcaggaatgtatagcacagggagagacatctgagataagtgcagagactgtgtttgctcatcaagggagaacctgagtatcaaggaccataatatccagggcaccgggttaaaatagatctactctcaatacagttgactacagccaagagcaggatttcttgtccttagtgatttgagtgacaaaaatttccaagtgagttttcagaaacatagttgggtaggtaaaggtcaacatttgaatttatgaagggtagacattccagtgaccctatttttatgtctaatatgcagagcactctcttcttagtatcaaagtaccaggaaattgaatgataattggaagattataagctaaacatagacgcgtagaactggaaggaaattaaatgggttagaggaataatgaatttaggccgctgatttccaggcaatacatagtgaagatcactaaattatctacattttctattaagagacccatgaatgaagaagagagaagcagagggaaagagagaaactgattgaaaagatgcagtcaaaacgggcgttaggaaaaagaaggaggtaagtagaaaaaaattttcagtttgtctacaataaaatgtaaagtctaattaactctattttccaaaagtcatatttgctgtcaagatacagttttgcctacataaattagatggacatggaaccattttttcctctctaggcttgaaatttctattgcatttctttacgcaaggaacagctccttctaattctctgaaggtctctctttacctctctgttgtacttcctgtgaaatatattctttgtgtgtgtgtgtgtgtgtgtgtgtgtgtgtgtttgtgtgaactcacttgctggaagtgttttgttgtagtttccttacccttttttaactggattcttcttctttgtctagctcattcatactgacaactccaatgggacatcaagtttcccattttcccactgccgccccaagtttcccgtttcttttccttgtttttatttatttattagtgttattatttttcagaggggtaaaggggcagaaacttggaatgttcaaatgtttttctgatggtgcaatcagataacttctactctgctgcaaataccaatcccttaaagcatgtaacaattttcctccccacctggcagaggtaggaggcagtgttgtatgtggtggtctcagaacttgtctactgatcttttaatacatttcagccaatatcaaaggtagtctaattcagaatggactattacctttatttatttaatttatttatttttgtctattatcatttaactgagtactattaggtatggcaggactggagaacttgctaggtatatgcaggtctatgtttctgtaggtcttcagcaaatacttggcaggcagttactacagtgacttacagatctcctctattgcacaaatacttgccaaacccttaaatttctactccaaatgttaataacaaacttaagaaaaatatctttttgacagcactttattatgtttgaaatgacaaagttttagcaatgatatctctatagcaacaattattggaaaatgttaatgtaactattaatcataaatggaagataccagaaccaaggagagaatataggggagaaaaagagtttgcttcccttctttgaagtctgaggatttggtctattttattagacttgcctataattctctacagagcaacagattttgaattttatgaaaaaccctcttaggtccttatatttttcatgcgcgtccatgtgaagagaccaccaaacagaccttgtgtgagcaacatggctgtttatttcacctggctgcaggcgggctgagtccgaaaagagagtcagcgaagggagataggggtggggccgttttataggatttgggtaggtaaaggaaaaagggggcttgttctctggcgggcaggagtgggggtcacaaggtacttagtgggggagcttttgagccaggatgagccaggagaaggaatttcacaagacagtgtcatcagttaaggcaggaacaggccattttcacttcttttgtggtggaatgtcattagttaaggcaggaacccgcgatctggatgtgtacgtgcacgtcacaggggatatgatggcttagcttgggctcagaggcctgacaatattaataatagtgtttctgtgagtcttaatttttaaatgatatggtttttattttttctgttttattttgttgctttaactgttttctgaagtgtgtggtggtaaattagaataggctgcaatgttcttttctagccaggcagcattttaaactaaaggttgtgttgtgtaattcttagtattcttttttgttgtggtttcttcacttttatctttcccttagatgccaacccaagacctgaaacttttttaccaacatctgtttattattttatttaaacccaaggaacataagactgtgcacatgtacaatgtttatatgtttgcatgtagccttcagatgacttcttcacatttattcttgatgacttggctccaaaaccatctcttatattcagttcttatttttggtgtttttttctcttcttggcttcaaagccaagcgtgattctaagtggcactggttggatgatcacaacagaatctcaaaaaagccaatgtgttatgttttatgtttagaactaacaaatgcgtctcatggcttaaataactgcctttgcaacaaaggatgggagctaaattatactcaccacttactctcgggatctttcaagtgtggagaaattaggggaacgtcaggatgttcttgtcctttatttaatttgttgataaataaataaagtgtcaggcattttgtttttaacttttaaattacctcctcagcaagcattttatggtggtggaagattattttatactttcaagtgtaagtaaaactttctaaagttggagagttgtcttcattccattccaaactactgaaatttagctgtaaacaagacttagctttctggcctgttaatttcattgtgattattgccctttatcttcaaagccatgtctctcatttgtgcttagtgaagaacaaatttgtagagtaaactgttgaatgagatgaggaatacaattatcatggaagggagggctttctttgaaatacttgtgccaagttggaagtgtacatttcaaaattatcttgcaagttggaaatagacatcctaatttagtcaaacaatttgatcagagatactttgtccaaattatttgaataataaaaatggcagagaattttctctgtaccaaccaattcatgtagcacattaaattatgtaaatatctccctcagcactatcccactctacaatttaatagtatgttactgagaaaagggaaaatattagtttaaaataaactataaattaaaaagctttaatgcatatttcttatatattttttctttttgtaaatagatttgaaaaaaaatcctgtattgcttactttccatgatttttttaaacttagaacaaaccattttccttggaagtttgaattatatagttgtagtttctgaaccactaagtaattatcatagacatttaaaatactcctatggttatgattttgtggcttttgaaaaatgcagccagtccccagctgaccaaaaatttacactgcaaatatttttgcaaaattaaggattgccttttggtcagtgcagtgatcattattgagtctcccacccatatttagtttggatttgaatgttgtttgtgtttgctcatgaggtttttctcttttttgttgtcttctcctctccataaactggattatgccgttgagtgtcaaaatatgtatctacttatacctcaaatataatttttatatttatcaaatataataaatgtgttctaacctatctctttcaagataatagagacttggaaataatctagtctgagagatatatctctgctcacacagctgtgaaggagtagaactgtttggactcccagttagtagctcagcagagataacacaacttaatctaaaattgactgatttgaaaagagcaaaggaaaataaccaactgtatccatatcccagcaatttccattcttccagcatagtgtagtcggaagtatagttagaacatcatgggtttcagagtcagagaaaactcaattcaaacatcactttacaagatgggagacctggggctagttgtgaaaccttgctgatactactacatttatcctcttgtgtaattagatggtaaaaagtctgtaaggatgttttgaggattgaataatataataaatgtttgtaaagactttgccatagagtgaatatgcaatacacacacacacaaacatatatatacacacacacacatatacgtatatatataattaagcagtattttattattcctcttatctaaaattctaaggatattctaatggtagcattagacatttattaatagcttatttatagtgaagacccactgaattgttttgtgtattttattctctgacctgagtacatacatgttctctgccccagaagtctgagttcttaccttaacattatgatttttttccaagactttctctccaagatttctggacaagttgacatgttcaaaataataatacactaaaatcaatttgttaatattttgaaatgggttataattcagtggtataaaattaaccatcaagaaacttgaaatttgtgtagctattatctaatatgaaataagttaatatatgcaaaatgcatttagtgcttcaaatatattaggcgtgtttgagagctgggtatgatcatcatcactgtcattgtcactatcatccttttaatgtgatggacaggaggaaaaaacatgcaaatagaattcacatttcatttcggtctgttgaattcattggaccatactaagctaaagttcgtattcacatattcatttagtatttgtacttgtttgattccatttaattaactcacggatttattcattcaacacatatttttaagcacagttctggatatcggagatgcaaaggtgaccaaattcaatccttgctttcaaggagccacagtgtctcaggagagccagacattattcagatgatgaaatcaatgactgttcaactgctgttctgataagggagataaagtgcagatggagtcagggatcaaagcttctgttgggaagaaatgcttgggttgggtgctacagatgcaacgagagttcagcaggtaagggaagagcttccccagaaagaaacagcatacacagagtttctgtgccaggagggcacacggcattccttagaaactgggcaaaggatagagaggctaaaaagaaggtggtgaggcttgatagtgggagatttcatattcacagagcacatagctttggtggaaatgttttaaacgcacggcttcattttgtgttcattttgtcctctagtgaggtagatgctcaccccatttatgaatacccaggttcagcgaggttaagacatttacataaggtcaactgacatctagtaactggcacagctgcaatctaaattaaggaatctctggctggagctgaggattgcagcctcactacagtgtagagattaggagtttagtatggattagaccacacaagtctgatttattaagtgtttttcttcttagagcaatagaaagacgtggaagaaactcaactactaattgacaagatctaatttagttgtaaaaaaacaaaaatggttctaattgcaccgtggagaaccaatgactgcattaatttgagcaagagggagaaggaaagacaaattaggaggtggttggcaattttgtggggagaataaatggcaccatgcaggaacaaggaagagaagtggacatgcattttttttctgtttttttttttctttttgagacggagtctcgctctgtcgccaggttggagtgcagtggcaccatctctgctcactgcaacctctgcctcccaggttcaagcaattctcccgcctcagcctcctgagtagctgggattacaagcatgtgccaccatgcccagctaatttttgtatttttagtagagatggagtttcgccacgttggccaggattgtctcgacctcttgaccttgtgattcgcttgccttggcatttattgatccatttataaactattgaccttgtaagaatgtctacagcagagtgtttaatttgtatgtctattcattaaaactcctttgattgatagttaattggtttataatattagtttcaagactaaacaagctgtgtatgtaacatttgatctttcagttacaggctttatcacaaaaaagtaatgctgtatctctttttcctggatttttatccacctgaaatttctgatgtccacaatggtcccacctggctatctactttctgcacatattttcacgtgtaatttgaaattgcatatgaatgtacatagataaaagtgacttcctttcaaaaacatttagataagctaggtgtggtggcacacgcctgtaatcccagctactgaagaggctgaagcaagagaatcctctgaaccggggaggcagaggttgcagtgagccgagatcatgccactgcactctagtgatactctgtctcaaaataaaaacaaaacaaaaccattgtaataaaataatgtaactttggtattggaaaggagaatctagaaaacaattagaaacattaaaaatacttattgcttagatacccctattgcattaagagacagaatctcaaaaaatgtaacagatgaggctaaagctactctactggaaatgttgaatctaacatttaaacctaggcatttgccaacaaggtagcacctctcagtaaaggggtgctcaagattcaactgttcattcaaaatagatgaaaaccatattttgcacaattgtggcacatgctaattacaatatatggatttttagaattgttctttccttcttcatataataactagggttatttcatcagaacactcagtaatcctgatgttcaccacaagactgactggagactaaagatgtttctgaaagacagaaatattttcacaactaatccaattatctttagagcaattttttgtgtataaataattgaataacatccttcagcatgtggtacatctataagcatagccagtgaggccagcataatgcatccacactataactttaaaaagctctaaatgtctaccataaataattgagctagtagtttaagaaggaaaacaaaacaaaaacaaaacctttttaagtctttgaaattctgctcttgaataaatgcctagggaaaaaaaaaaacatttttggcgttttccatacacttcttgttcgggaaaccacttaaaatttacaagatttattccttacatttggaacaaaatactttttgttccatcagatttccttgaaagatatttgttttcaagatgtttgtcaccacttgtaagtaaaataaaatataggggattttcagtactggagacattttgtacagcccatccccagtgtgagcattctgaattaggtgattcaggaagaattatttctttttacatttattaaatattaactctgctcagacctctttgaaaactacagagactgattgcaaatttcctcaacttggtatgaatttaaaatgccaagaatttatctttttataaaatagaccattcttaatagtttagactatttcttcttaaaaaaatgtggctgaaaaactggctgttgggtactgtggtcagaacctgggtgatggtgccattcgtaccccaaacctcagcatcacacagtatacccagttaacaaaccttcacatgtaaccctaaatctaaaataaaagttgaaaaaaacagaaaaaattgttttttctgttataaaaaggtttcagattccaaagtctaatatttccacattggtaagatatgctttaattaggaaaaataaatacctcacctttactctgaaactttgagtagcatgatatatgttagtgaaggttcagagactcacatggaaagacaaaacctatagtcagtcctgaaagagtggtataaatgatatggtttttttttgttgttgttttaattttactttaagttctgggatacatgtgtagaacttgcaggtttgttacataggtatacacgtgccatggtggtttgctgcacccatcaacccgtcatctaggttttaagccctgcatgcattaggtatttgtcctaatgctctccctctccttgtcccccaccccccgacaagccccagtaggtgatgttcccctccctgtgtccttgtgttctcattgttcaattcccacttatgaatgagaacatgtggtttttggttttctgtttctgtgttagtttgctgagaatgatggtttccaacttcatccatgtccctgcaaaggacatgaactcattcttttttatggctgtatagtattccatggtatatatgtgccacactttctttatccagtctttcaaagatgggcagtgattgcaaatctggatacctgtgatagatagcaaaagtggctgacatgatgcttctccctctgcctacacacttggtttggtccctcccagtctaactctggttttagctaatgggctgactacaaacttgatgcaagcacagacttgcaacatgcttgcacactggggcctaggaactctgaccactaccatgtgagtgggtcttggctaacctggcagaggatgagagacacgtagtctagtcttctcatcaccttacttggtcttgagcccatcaccagagtgctagtgagaccatccagcttcagccaaaccagttactgttgaagaaatccccagttgccctacacatttgtgaaaatcaatccatattattatcccaagtggctaagttttagagtagtttcttacagtgcaaaaacggaattatccattaggtacttgataaatgatggtaaaatattagtgtagacatagctgaaatttctgaagtcccctatgctaccatttagcatttaatagaatggggacaaattagtgttcagcgggaagagaacttgtgtgagaatctagattcatgctctgtctgttgcttttcccataattgtgtacaaggcttggaacaaatgcttaagttacctgaatctcaggctttacagctttttcttcattaaccactctgtgagtgctgtagtcctcagagttctgtctttggctgctgtttttcccacttggcacagtttccttcccttcgtgagctaattatggcataattccactatcctctatatacccattactcctgcatctgctttgtaagctgaaatcagattttctctgacatccagactaatacactggaaatttcagctactttcttagcatttcatacaggtatttcaaacataaagaaagaaaaaattaaaaataagtagaaaaaaaggaagaaaagaaataagaagaaagaggaaaggaaggagagagaaagagaaagaaaacagctattttccccctttactttttgacttacttattttgtattctctctttcacctggtcacaacatccttttcctaggtaataaaagcttatctcttccttagtccttaaatctagtcagttatcaagttctattgatttatcttttaaatatctctcaaattcatgcacctcctctctgtccctagtttgatacctctcttcacatcttcattgtgttttacctcaaacgtttaaaacatatctcatatggcctgtctgccaacagttatcttttcttcaaaactattgaaaatcagcaaagtaatcacttcaaaatgtaagtatgaagatccttcccattcctcctgcataggatctgtccattgtacactgtcgcctgccagcaaaaatccaaggtcctcaacatgttatgaaatatttcattgagttgttgctgtaatggcggttgttttatttttttcctttttttcttatttatttttttctttggtagaagaaggaagagtatgagttcagttttacacaaattgagttatagataccagagacaagtctaaatgcagatgttaagtagtcaaaataatttgaaataacgggcctggagtccaagtaaaagggctagaatgtacatacaaagatcatgctgcatcctctctggatgatttttggaattttcaaagccagagacctgaactatttcaagactaaaagaagaggtgcaagatggtgatccacaaagtaatgggaatggatggccaaagagataagaaaacaaagagagtgaaggatagcagaaatcacaggggaaacatcttttaaagagtgagtgttaacaagtgaacctgcccctgaaatttcaagaaagatgacaactgtgaggtgcccttctggtaatggcagcacggcagcccagctcagaaggctcaggagctccatccatattatgagattgcttatcaaatatggcagagacttgaaggaactttcatatacttttctaaaattctttttgatgaagaggtttacaagatgttaaaagaaaattttagacacattaaatttaacaggatttaattgacaggaaaaaaaaaatccacaaatcaggcagcctccagaatcacagtagattcagagagactccagggatgatgccttgtggtcataacaaatttatagacaaaagaaggaaagtgatgtacagaacttggaggtgaggttcagaaacaactgtattggttacaggttggcgtttgcttgatttgaacacagtgtatgaatggttgaagtatggctgctgcgattggccaagactcagctattgttacagatgcatactgctaagttagattttcaatcttgtctacctattaagttaggttacggttccttcacaaagactgaaatacagaagaacatagtccttctcaggccatgtttagcttgctttaacaagtggtagattcgtgtatactcaaattatatgtaaaaatttgccagttgatagatatattgtcagagaagaggataggtcgctggaagaattgaaagaatagtaaatataaatttttcctgctgtacagtagaagagaaaaaagattctgagcatttttggaatctgtattattagcctaaacaataactaaaacaaggaaacattgaagagcctctatttgcagagatttattttttttcttgagaaggagtctctgtctcctaggctggagtgcagtggtgtaacctaggctcactgcaacctccgcctcccaggttcaagatattcttctatctcagcctcccagttagctgggattgctggagtgcatcaccacacctagctaatttttttttttttttttttttttttggtatttttagtagagacgggggttttcaccatgttgaccaggctggtctggaactcctgacttcaatgatccgcccatcttagcctcccaaagtgctggaattacaggcacgagccactgcacccagcccaagaaatttttaatcttctaatagtcatataacattcaggattccaaaaggaaagactagatgcgcgcaatgggtatattgaaaagaatttcacgaaggactacttacagagcgggcagggatcaggtagctggtcagggatgccgagacttccagggactagcagcactgggatgtgttaccacttccaggcctcagtgagcacagggagagattattcatgaggatctagtgacagggaaagaggggagaaagaggcgcctcccaatagcatccaaaattttgggaaacataatcacagtcacaaccaaagtactgaagttgagatggaacagagaagaaatgctcaggttattctctccttattctcctattagccaagctaaattagaagccaggaggtaaggaagtttggtgatgcatccctagggcacaagcatctcaggatacaggacaggacagagaatgggagaggatgggtttggaggggaaaatggagaaaaagtgatgtagtcctctagctaaaggcaatgcgcactaccattctcctcactttctgaatatacagcagcaagatgtcaaggcagaataaaaaggcacccactcaaatgggttaccatttggaattttgatctctagtctttaattcagagaagagaggtaatctgatgtataggcttaaaggtagattgagatttgaattctgtttccaccacttaagcggtgtaacaggcagaagagcctagtctgaatctcagtttctccatctgtaaaagtggaaccgtaataaattctaagagttttataaggtgcttggcatctaaatgcaggttttttttctttctttctagaatatcatgctcactcccaagtgtgagtgagtgacattgcatttcattaaaaatgtgacattgcatttccaaatgtgtatacccatctaagtgagaaatctcaaaatcccaagcaataagctagagtttcaaaactatcacccccaaggacttttcctaattcagtatttcaaggttataaataaatcctactttaatgcacacttgtgacctatactgtttcagagattggttccctgatccttatttttcttcctcaaagttttcacatgccacacatcaagacacacactttttttcttgtatactttaggtattaatttcttatcaaatgaagttcagcaccaaatcaccatttccaggaaaaaaaatgagatcaaggacaggacctttcaaaactcattggattagatacttatagaaatatcaccttacattttgttattaatcaaatccatttgcatgccgctagtattctgtggattcttattataactggctttgtgtcttttggaggttgtgaattccagacaatcctggtggctgggaagaatctgaaaatgttcgtattccatgtcacttgtgatgtgaggaaacaatcttacagccttaaaatccttcatgaaattaaatattatcttaagaaatcctaattaaattatctcccattccatcttcattttcatttctgtgacttcattctacgctggcctgcatgtgacctggcgcacattggcttcacattagatgaaatgtgactaaagcctcaaaaaaataaccttttaattaccttttaaactctataaagagaattcactttttagtgtgacatcattctatgtttcgagcatacttattttatacccttgctgtactaatttgtcttaatctctactgataaccaaccagatgctgaaatattaaaatagattttctctgtacatctctactgatacaaagagattataagcaaagaacccctcgatctttcccaattttgaatttattaattaggcctttatcttatagtcctttgcaaagaagagcagaaataacagtctagttggcataataacaaagattctgagggagcaaatgtttctttagaggcataatgacaagtgatctttttgaagttagtgaaataaaaccgaagcaattttatagtgacacatcaagatggtgccacgaacatcaaatgtgctgtgcgctaaagtcattaccacatttcacaaaatgatactctggctttttttcctgaagattaaatataacctcaaaataaagctgcagtacaccaatttcaaaatgacaaacttaaaaatttctactttaggttttcttgtatgtgtgacatttctatcctatgtgaaagcaaagttctcatgaatttacctcaccattagttaactgtttcaaacatatacattggtcagcagctatatttttgtcatttacttctactgatagaaacctagctaaggtagatcatttgagaaaaaaaatcctggagatttttttacatataacgtatgatttaaagtatgaaatgttgaacagaaatacagagttaacttattcgggcatacatttaaacgatatttttaaaccactgggctggaaaagcatgatacatatgaaagaatcatatttaaattatttaaaaattaccaagcaaagaactttggttattttctataaataaccgtgattactataggatgagaaggtatagacacatatatgatcaaacacatacaaatgaaacaaaaagataaaataactttcccagaatgtcttcctttttttgtgaccgcaagatcattctgagcatatcctaaaatatgcacacctttctttggtcaccacttatctaagtaataaataagagaagtagtgaagaacacgaataagacagggaaagggattgatggaaacggtgctgccatgattacagctgcacattacagataaatgacagattaagtgcagtcatctaaaaagatggataaatgaggatagcaacacaaaatataggtgagatattagtgaagaagcagaatgagcaccttcaaaacttctctataagagcaagaaaaagcaatggcacacattgtcagaataaaattttgcaagactctggagattaaacagagtcttggagcaatctcaatgtttatttaaaaataacacttggatctcagtaagaaagggaagacctgtgaccttttaacttgccaattgtcaccaattcaaaagaccattaaatgcagcatcccttctcttatttgatcttctaagagtgtatgacattgtggatcttcggttgaaccacacttttcctgaatgttcggatgcaacatttctattacattggtgcaaaagtaattgcattttttgccattaatatatttttctactgattttctgacttattccttgtttcttttgcacactttgaatttaggtattgctcaagatgataacatgtgccctcttttatcactttatataatatgtttagtatcccattcattccaaaggacacaatcaccattgacatgttggtaactccaaatttggtgtgattagcccactcttccctcatgtgttccgggcttttagcatctttttgaatatcaaagcatacactgtgacaatcttaacacacttatgattttggttctcctaactctcagaatgcattccaaatccacagttccaagcttcttcagttgctttataattttagctcctttccactggtgactgactctatttggaaagtattcaataccttctgatgaaacttgctattattttttattaaaaatatgtttccttatgttccactactatgtgattggcttgaacacatacagctttggtagagtcccagaatgagattttgagaaactttttcataactacttaggattagaaatacaggggaaaaaataactcttgccatttcatttgactgggaggttcaattggttaaaggaatcaatgaaagtgagtagcgtttcaaagctgacagttttaacctctcaagtttgccctatttactgaacacgttggagaaaagtagggataaaagatcagaatgagcacaaagaaatggttttccattgtagaaagtaatcagccactctgggaatggtttccaacagcaactatgaaatcatccatgctgccagttgacattagaaataacactgcaactatgtttaaagtgaaaattttctgagaagttcaagagcagccaagaaaagatattaggaactctaaattccagaaacactcttctctgataaaaatcttgattttagtcctttgttaaaatcatctgtggcagttgttataagatcttatttgtgtgtgtgtgttccttagaattatctatatacaagatcctgttacctgtaaatagagataattttgcttcttcccaaataatcagaatacattatctttcttttccttggccaattgcattggctagaacctataataaaacattaaatggaagtgggaaaggaggacatccttgtcttattaagatttttgatagattttgatacaatcttgttgatagacttttagtcaatgaataaaggcctttataacctcagttatggtatcaagatttatttttttcctgaactgttcagacacgtaagtgataaatgggatctgaatattagtttatgtagacttgctctttctactgctgagaaaataatcctatgctttaacttagctttgtagtctgagcacaggatttgttctttataaactcagggtctttttctaacttatttattccttttacctctgtcagcttgctttatcttactactataagccatcaaagaccatcttgagttcaaaataggaattatatttagttatgtttatgcctatggagtgagatagagcagatttcactctgcccttgcccaagggtatgatctttaataagttatgaaaatccccattccctcatcttcttcatcttaacatgataataacaatagtatacagggttgctgtgagtagtgcaatcagcataaacgaatcagtaatcagtctgggcatggtggctcactcctgtaatcccagcactttgggaggctgaggcaggtggatcacgaggtcaggagatcgagaccatcctggctaacacagtgaaaccctgtctctactaaaaatacaaaaaattagctgggcgtggtggcgggcgcctgttgtcccagctactcgggaggctgaggcaggagaatggcatgaacccgggaggcggaggttgcagtcagccgagatcgtgccactgcactccagcctgggcgacagagcgagactccatctcaaagaaaaaaaaaaaaaagattcagtaatcataatgacagtgaccagtgtttattattattattatttaatgcattaaataaggaaacaacactggcatgacactactttcatgtgtctcagaatataaaaatccaacaggagaaaaaatagatacacatagattgcttatgtgtgttcttgcatttatctccatggtgccaagcccatttctgtcaggtaagccatcagtcccaggtttccagtgaaagattatccactctgggagctcagttcctgcattattcatgtcattctgcatgcagctagatttatgtgtcaggaaaaacatacaaatggaatccgatttacttgcacaagttcctgaaccatttgatttatgtttgagtaaataaagacatatgtcttataggtattggcttcacttctctttagaaatagaagtgtaatgctacgacttcttttcttggcaggagtagacttctaaagttttgaaagcaatgcaacctcaaattatatactttcaattttcagatgtgttcattatacttttccatttgcattcagcactttgggcatcaaaacaatggaaaatctacagctctggaccactggaaaaggttcaggatttcctagcttagctgcaaatcatagaagcagctacaataaggaattcagatgtaaaaacttattcaaaccttcctcaagctacctaatgtttaggctacagatagcttccaaaatcacctcagcaaattgtacatttagcattaccattcactcttcctcaggagggccctacctggcttcaggactttcatctagccttgatacattgtattcattttgcaagaatgtcaaggttatggaaacaaaggaagactgagaaactgttatagaccaaaggagactattggggataagacagctaaatgctgtgtggtattctgaattgtatcctagaacagaaaaaggatattaatggaaacagtggtgaaatttgaatcaagtttgaggtttagttaatagtaatgtgtcagtgttgctttcttagttttgacaaaaatgagacggcagtacaaaatgataacatggggtgtatgggaacattatggggtgtgcgataaggatgtatgggaactctactatctttgcaacttctctacatgtaaaatcatttcaaactaaaacggtttttttaaaaataaacaaacaacaataataaaaacacgttgaaatttaaataaacgtgttttttctttggtaaacaattttacgtataagaaagaaagtcacctccaaatgatacatatccagtttttctccctttgtatctttcgatgtctaagattttatgaaactcaaaaaaattaccgaacctgcctgtggcagcaacacattttgaaacccacctgatgcaaatgaatgtttatttggttgttgatgctagaatctacggttacttctgctgttctagaaagcatatataccatcaaaacctgaacacatattttatcagaagacatggaagtaaatttattgaatccttgaagcttaagtcataattttaaaataaaaaaattgaattaggattaatgagagatattatagataaaatagagatttcttgtttacatttcacattataacaatgaaaggaaacagaatgctgtttggatttattattctttaaaggtgaaaaaagcacttgtagagttgagcaacacgaggtatagattcctccacctttctctactcacatgaaaaatgtattttaagaatatttgggaaaggaggagctttctgaagaatgacactaagaattaaaatgtatcaaattgtttctgtttaaaatcagtcttacatttatgttaaatgaagtaataattgataaaacaatattaagttgagcagctctatcagagaacttaagtattactcttagtggaatgaaaacagtgaaatatataatgttttggatcattaaatctaatactaaataattatttttaaagactcagaagcccctgattaaagaatataaatatgctgaattatgttcaatagatgtttgtcatatccacttaaggtttaatgaagtccataaaatttgcatgtatacatcttaagatacattacaaaatgtttccaaagtaccaattttggtttactttaaaatgtttttaaatttcagtcattctgggtattgaatttctagcatatattacagagcaatttcagcaatggttatacacaaaatagaacttctgagtttatttggtctcatttgtgtgtaaaaactgtgatgttatatacaactacctaaacggtgttagaattatgtttttctgcctggtagcctattgtcaggtcaagaagggagtaaaatttaagtttttcaaattagatatgaaaagaaaaattgaatcttcacagtttaagttacatatggcataactttggtgcagacttcagttgcttttataatcacaagcattcttggaaaataacatctatgcaccaattatggacttttacataaatttctctaggtctcagaatagatatcttgcaaagcaaatatctgcatgtgaaggagactcctgtactttaattttcatgaaacaatgtctttaccctgttgcttacatctcaggtaataaattgctgtttctttattgagtcatatttaaaatcaagctaaaatcaatttaaattttttttcaatgagtcttttaaaatttgtaatgtgtgacttctttctcattctaagtatacattaacattcacatctacttttgcatttgtagtttttaaaacatttcttaaggagagttctcagaattgtataagcttcagaccttacaaaacctaaatctgcatcaaaatgccaactgacttttaatttcagaattaccttggcaatggcacatattagagccaaagctatctggagtcctctagcacccaggaggagacaataatgagcatctgtggacacagagtcacttataacatagatgcaggatgaaaaatggcagagcgtggcagcctgaacctgggttctctctccctgcttaactagaacttgcctgttctccacagtttgggctgaatttcacagctcgtatagtttgcagaatcatcctcaacacttttatttagccggatgcccacttatgctcccaccccaccccccgctagccttggtcctgggttgtcatgcttttcatggtaggttagtgttgctaacctcatatgctcccctcgtgggggctcaatttcagctcccataattattttacaactgtaaacaataacttaattcatatagtatggactaaaaggtaattctaggagcaactaaaagggacttccctctgtatttgaaaggatggtgtgaaatgacctatattattaagtgatgttttagactgcacatcaaaacaaattaataacaaaaaatatttattttaaatttttaggaaactagtcaatgtattttaaagctaaacatggcaaggatatgagagatctagagataggctacagaaagcatctgtagttttgtctagcatgcaatattgtctagggttcaaaatgggagaaacctaagtataacttaatcagggcaaaatagcaaatagaagtagtagattagaccaatagtaaaattatttagaaaggtgttcctttctaggccaggtgcagtggctcatgcctgtaatcccagcactttgggaggttgaggcgggcggatcacctgaggtcaggagttaaagaccagcctggccaacatggtgaaaccccgtctctactaaaaatacaaaaattagctgggcatggtagcatgtgcctgtaatctcagctactcgggaggctgaggcaagagaatcacttggatctgggaggcggaggttgcagtgagctgagattgcgccattgcactccagcctgggcaacaagaatgaaactccatctcacaaaaaaaaaaaaaaaaaaaaagaaaggtcttcctttctattcttaaaaattaatgaggattaatatatataaaccatatatatgcatttatacatatatgcatgcacacacacacacacacacacacagtcctccttccgccagtaaagataagaattattctgaacaaaaactcattctttccatgtgaatagcaatttatatagttaatttttaaatgtttaaacttctttgtgtaatagtttattattggaccccattttccccatttggtcataaaaatgatctacttttacaatggtatagtatcctgcagcaatcatttttcttcctctcctcctgcttctcctccttcttcttcctcatcttcttctaagctccattataacctatattcacatttgcagctttcagaaagagccaaactgtacagcaaagaaaaacaccataaattcatgatgaaatcctactttgggtattttttatgtactctccagtctgcaaagagtaaattaatggggatttctaattttgttcttcagaatgaaatagtgtctggttgttgaattcctgagctactaatacattttcaagcctgacattgtccattttacatgtggaaagacaccttctaattcagtaagtcaactaatattgtgaaaagcagttgtccattttcttctgtcttcactgtaccttaatactttcttgggtccaaatgaaagcaaatacactttcttcttatttcctggattctctggtccaaatatacctttacttcttgtcacaccattaattatctaggcagttctacacaaagtattgtcttccttcagcaattttttatcttttgaagtcatagatatgtatttctctaaactaaacaaatatgtactgacttccaagatacattagataacatgcagctaagtactttcatgtcatctcgtttaatatacttaataccctgtggaacagagagtattgctgctaatttgcacataacaaagagaatgattagaacttttaaacaaattaaccaagtgtgcatcactggctagtggcagcaggagcttcccattctcatgccagttctgtggtcacaaagagcaaggactttgaaatgacacttagctggaccagtctctccacctgcaggctctcgggcctgcagaaaattacttaacttcactaaacctcaattatcttatttataaagtggagatacaaagtactacagaggagatttgttgatgattaaatgaaatgatgtattaaaagaatttaaccttaggaaagaacatcagaagctgcagctaacagaggcgtccagtttttcccaaacccaaatccagtgctttccactaaattgtagacactgttcattataatcgtcccagattttctgagcatggtgggtcatgcctgtcattccagcactttgggaggccaaggctggaggatagcttgaggccaggagtttgagaccagcctggtcaacatagccagatcctgtctctacaaaaaaaatttaaaaattgctcaagcatagtggcgtgtgcctgtagtcctagctactcaggagactaaggtgggaagatcgcttgagcctaggagtttgaggctgcagtgagctatgattgtgctactgcattccagcctaggcaagaatctatgacatttcactttcatgtccaaaaccaacataattatatacattagtaggcacccagcagcctatataatgtccctgccattttcactcttagataactgactccacactccaacatcatgccaggactcctaattgcattatattataccaagtataatgcatcaagaaaaaatttaaaactcaatattcaagaagcataatgtatatttgagtaagtgggaaactagagaatctttgtttttaattacaggcttctgtacagctgactttgctgccttccttaaatggaaaaagaaggaaggaaaaccaaaacaactttccatttctggttttaaacatggagccaaatgtcctattcctaacgagctggggggagcggcaggagagtggggagagcaaacaaagctttaaaaattaatgttcttgatagaaagacaggcttcaattggctatttaggtttaactgttgtgggtctccaatatgacctcatgggatacagctcattaagcgattgtatgaaaacataagaaaataattttatccaaacggtagccactccaaattttcatctcgagttaaccacaagttcttaatgtttcattagtagaggggaatgttcaaattgagaaatgcataaatgaactctccaaacgaaggcatacatccttgttggtttctggttctgggcaaaagttcagacaactgtgtattttatcaaaactataaatacgtttcaatgtgcatccaattaccatgcagatctctaaaatgaaatgtgtgcagtttctgaagcacccaaaccccctttctaagcgccaaaagcaaatggctcaccttaaacctctcttctatttctatctttagagttctgcatggcccatactctaggacagaaacaggattagaaaagactgactcttgtagcccatccaaaccacatacagattccgcctggtttcgataaatgagaaatactgttgggctgaatttatgctaccaaaagtatttcagtgtcttattctctttccagggacttgtgtaaggacttaacactcaaattgggaaatgattaatttattgaaagctctgatttccaactctgaaaaattagtaaactttaaatacctcaggctattggaaatctctctggtgtctaaaccaattaaaaaaatcaagggtggacataaggtaactaacactgagcttggttttacacaaatagccaaatcacgtaaggtgggagcagaaaataatccatgatgtagatttagataaaccctagtaagaaaggcaaaaatctcctccagaacacaaccatgataaagtgtagtccaaattattttatttttaaaactagaagcccagagatgcttcaaaagatgcacactcacaagaaacactaattttaattcactccccatcaaaggaacatactacctggaaactatgatgctttatataaatgttaatgtcatttttaattttttaaaaaactttttaaacaatgttgacttttttattcaatcagaggaattctgaaatttttaatgtattaaggatgtagtcaaattctttatgaataaaaagtgtttcattgtagaaaaccgtatttgagtaatatgcaagtcctaaaatgtggaatggatttaaaggaagaactagcagatttcttaagaacatctcctactgtcctttagagatgtctaccaccttgatttcatttgcgttcccaaagactactgtctcctaactggcacccctgactcaggtagcacccctggaaacatgttcaccattatcttaaaaccactcagctatgattatatcaatcctcagcttaaaaccctgcagtagtaaatccctatgacccatgaagaataaagtccaatataagctcttagcttttcttatgaaaagtggctttggtggtttccaattttatcaatcatttatcttccatgtaccccctacacaaaccatgatcccatgacaacaaactgcctgtagctgcttaaagacatcatgctcttttttggttccataggatagactggataaagaaaatgtggtatatatatataccatggaatactatgcagccataaaaaagaacaggatcatgtcctttgcagggacatggatggagctggaggccatcatccttagcaaactaacaaaggcacagaaaaccaaataccacatgttctcacttataagtgggagctaaatgatgagaacacgtggacttatagaggggaacaacacatacaggggtctttgggagggtggagggtgggaggagggagaggatcaggaaaaataactaatgggtacgaggcttaatacctggatgacaaaataatgtgtacaaggaaagcccatggctaaatttacctatacaacaaacctgcactgtaaccctgaacgtaaaaattttaaaagaaggaaaaaaaaaaaaaaatcacgacaccatactaattaatacctacttgtcttcacaactcacaatcttccttctgtctggaataagccctttcacttctttaacaacctatctccttggaatgtttgagaatcagctctcattcagaagtaagacagcttgaacatacattgttgtaggagacttccctatgtgcctctttatgtttcaccccctcctgtaggctacctccccacctccactgcacttttattattgcatgctttcattcatctcagtcttttcattatttcagtacatacccaggtttgagttctattattagatttccaaatcttagcaggaagaagtagcattttatattatattggttttctctaaaatatcttacagaattcacatctatagtggagtcatattctttggactaaaataaacacccatattagggatcttttgactaatttaatatgtgcaactgtatacgtaggtgacctttttgtttgtttgtctgcttttgtgaggtcaaaaatcattctccagatctggctgacaaatattttattaagaatcttcaattatcctttgccaggatttgcacaagataaacatctgtgataagatgccactacatccttttaaatattttagaattaggtggaacacagaaataaactgtattgcagtcttttatttttaaaattgaggcaccgaaggcagagaaaatacaggaagagcatgagagcatgcttttggtgtgtttctatctttgacacaaaaatgacaaaactctatcgacaaaaaagggaaaatacattctattagataccacaattttataaacaaacagaaacacacatataaaaccccataatgagtttcttaaaaagtattttttctaggaagaggtttttctttttagttgtcaaaggcaagcactcaacagtttaagcttttgcaaaacaaaatcatctgatattatcagtaatggcaaaaaccacaattatatttgcaccaacctgcagttcaaaatgttgcctgtattatttattccatctcttcatttattcgctggatattgtgtgcctaccacagcctctgtgctgaagttaaaacgttgtaagtgttttttttttttctctttgtttgtttttgtttgttttgtgtgtaagtgtgtattgtggaggcagggaagggaacaagaaagaacaaaacaaaaaatgacaacaaaataaacaagacaagaatttagctttgtaaacctgacattccacctgtcataataagtctaagtacaagggaggagaggatggagaatatggaatctgcatggtttaaaaaaaaagaacctatgttcaaaatgccaaattcttaatataaattagaaaaaagtaactcttagccaaatctttacatttaaatatgttttaaatttgtcattataatagtcgcataatttttgactgaatgcctttttaaatttatttaaccagttttattttgaatttttgtttctactgtatttctgttataaataaagatgcacaataacatccttttacttgaatatttggccaatccctgttcgttttcttaggataggtttttagaaatagggttaatagtccaactttaagtctgactgatacatattatccaattacttgcagaatggtatcctaaatttacattttcaatttttcaatattgtatgagaatgcctaattcattttcaatatttgtcaatttattgttgaaaatgtattgtgtattaatatttagctggcattagttcctcaaagagcacttttaaaagtcttttttagaacattttttccaaatgtgaatgttttatctgtgaattacctatttatgtgttttccccattttatgtctcctgggtgtaagtttcccttgtttacttattagcaaactttatggactgtatgttcccccagagtttatagtttgacttaccatttaaaataagatagccttataattcttcacttaactttcctgtgtgcattctcttcaccagtgatattttttcctttgtttttaatgctgagataatccttcctaattctatacaacaagtaaatatttagctacattttcttcaagtttttttttgttttttgtttttttttagttggagtctcactctgtcacccaggctggagagcagtggcgtagtctcggcacattgtaacctccgcctcctgggttcaagtgattctcctgcctcagcctcctgagtagctgggactacaggtgcgcacaaacatgcccggctaatttttgtgtttttaatagagacagggtttcaccatgttggcaagactggtctcaaactcctgacctcaggtgatccacctgccttggcctcccaaagtgctgggattacaggcgtgagccaccacgcccagcctctttgaattatgtttgggtccctttttattgttgaaacaatgtggaattgattttgatgtgtggttcgtggtgatgctctgacagtacgctgttcaaaattatccaagtccaatcaattattggttaatcatttccttccctatagattttgttactccacctttaaaaatagaactaaattggtatatccatatagcttatttttcagatatctcttctgcatgattgattagtccatatattcttgcttgagtgccatactgtttaaattaatatagcttaaccatatgttttaatatatggcaggacaagcccactcgctttttacttatggtgactggaccttttagatgtattcttattagtcttcacccttctttttcacttgaaccgtggtggccagagcattgagtgatggctaccctgttttttagctagcccagatcttggtcttaaagtcggggccacttttgagaaaatgaaggggaaagagtgaactgttttccttgttcaggttttgcattaggcatagtgtcagtccatcatcatttttttttttaaacccaactctttaaagataggtgaaaatcactccagattctaacgatgtgaagttgccattttaatttttaatactactaaaagtttttaacatttctaaatcatgattaatttttcatgagtaaattgagaaatcattcatcaggacccatttgcctgaaacccagaaagccctatttttctatatcaccctgttaaaaaggttggtcaaaacttgcaaaggaatgtatcatatgtgagaaacaaagaattaatggagataattcaggatagaacaatagaaggaagagcagatgcactttgtcgggaaagacagcagttataattgtctggagttacaaacctagatactcccaacttaataatctttctattttattttgctttttgtgttctgtgaaacaccctaacaattatattaaatgttttctacagaaacaaattttaaaatataaaatttataagattctaatgaatgctgtacatttgtaatctagtttttaaaaatatacatatattttagcaggttttatatataaatatatataatttatgtatttatatgtatatttatatatataaaacctcagatattatactttgctctcagaattgttttgagttacatttacatcctttattttaagagtttctgaacatttctgactagcactaaagttgtgggctcatttcttcagggtcttatttcttgtgctccaatttgctgatgttgaaatgtctcatatactgctgggcacaaatattccaaacattactcacagaaattaaaagaaagtggaccatattggactggaattattcattcaattcaatgcagtctaacatggctaattccatgcgggagtcttaagtttaaataaactttccatggcaatctattttctgaagacttttgctttgtttgaattcttttatagaaggacattttcctccatatgtttattctcacagacaaatacaggaaaaagcccacttgctcttgttgacctttctgcttagcaactattacttttcttagctcaaaggtaattctttattcaagagggccttatttagaacacatgataggcattcagagttttccagtagcctctgaacactacagagtatttatttacattgtataaaattagaggaaatgaaggggtatgcatttgaactagaagcaatagcccaattctcgttatggagagatttcagtcaatgtcactttggggggtggtggggaagaactcagattacagacattttaaacaatacagatttttgttacctaacaatgaaatacatcattttgctttctcaataaaacccaggctgtgaatcatgggctatttctattctacacattggctaagagtacatttcaatccctgtcttcgcaaactaagacgtatggagtgatctctgttgacatagcccagatgaaactactttaggaaatatattatttgaaaaggacttggatgcatctaataagatgtctgatttgctgtgagcccatgcatttgcacatagatattaataaaagaaagttagtgaacaactggtatctagtatgatacaaatgggatttgtattggtatggtttggattaaaacaaaccacggcttgtgtcattgccattgtttaaaaagtgtgactggtatttagttaggttgagtttaaatatatttggaaacaagttttgctgaatccaacactcaagtttatcgtcagagaaaaaagtgctgttaatctgcactctcattatttctaaatgcaacacacaaaagcaatggttttagttcaaaggacaaaaacaatttagtttacctatatgtggtgttctgtatgtaaaatacatgataaacaaaactggaaaaatatatgttatgataaagccattgggtaggccaactgtaaccaagttttaccaattgtgagacagtttaacgttatctacctcctaaagtaattctagaaataaagaatgtaaaataattctagaaataaaagctaactgatatagctattgtgcagataccaaagtagttgaatatatctccatcctgagaaagttttagaaagaaaaaatgtaacctattatattcattttgacactgcaaaaaggctggagtaatccataacattaaattcaatgaacaataccacttttccaaagtaattgtcaacctattcacatcttcattatttaagctccccttagagagcatgtaataaataattttgcatagatgtttattttaaatatctatttaatttgtcaagctcaatgcaggactactgaaagtataaacaggttggaacattgttattcatttgtatacatcccagaacctgaaccttaaagttaagaataacaattttgtcaacaaaactgagtaaagggccagtagcggtgggtcacgcctgtaatcctagcactttgggaagccgaggtgggaggatcacttgagctcaggagttcaagaccagcctgggcaacatggaaaaaccctttatctaaacaaactagatacaaaaactggccagaggcagtggcgcgggcctgttggaccagctactcaggaggctgaggcatgagaatcatttgagccctggaggtggaggttgcagtgagccaagatcactgcactgtagcctgggggacagagtgagactctgtctcaaaacaacaacaacaaaaatcctgagtaaagattcctaataaaaagattatttaaaaatacaaaaatgtatatactattttaagaaattaaaatatagatcgcttctcagccttttagttaaaagaaagtgtaaaatatggttttgaagtactccagtaagttctgtactctttacaagaatgcagctaaatataaaatgagcacatatatacacaaaagtgttataaaatgaactttagatgtattaattaattgttgtgcattaaaaaacatttatcttctaaatcaggggtccccaacctccaagccacagactggcagagttctgtgacctattaggaacccagtagcacagcaggaggtgagtggcaggcaggcaagcattattgctgagctccgcctcctgtcaatcagatcagcagtggcattagattctcacaggagcacaaaccctattgtgaactgcacaggtgagggatctaggttgcacaaccctctgagactctaactagtgcctaatgatttgagatggaacagtttcatccagaaaccatcccccaaccccatggaaaaattgtcttccaagaaaccagtccctggtgccaaaaaggttggggattgctgttttaagttatgcattcacatatttatatgtgtttgcaaagatatacatatatatatatataatatatatatacacacacatatatatacacacatacatatatacatatatacacacacatatatgtgtgtgtacatagatatagaattaaaatggcagtccttatttctggctagtatgcttataggaggcacttcatttttcctttcaattttctgttttctaaatattttttcatttagacatagtgaagatatactgattgaaagactactaactgtagtaacgactatagaaacaaatggcttttgtgtatgtctcactgcactaaattaggagacacatattgttacgttgtctcacagtgggtgaaacttggttaaaatgggactgctcaatggctttattgtcacatacattttccattaataattattattcaataacttaaatccattatagtaaaactaggtgaagtcaatgccactttgtaagatgtccaagttctttgttgtattatttgaggttaatatcatttttgccttgttaatatatcatttcacttatgtcttctgtaccatgagaaaattaatctatgttttcccccaccttttaatttcaataatgattctgcccgttacagtctactttcaggtgccacctaaagtgataattagtatctattgatctaatatgatcatcctttttacctatcacaggacttttctccttacacaccccatccatttcatcaaaagaaagggggtgttgcttataacgagttcacctgcttgtcaattgagatggtggaaagaaagagatggttcattcagtgtgactatttacaaaggggtgagcagggtgtcggggaatgcaaaaaaaaaaaaaaaaaatgtaatactttgtgagtagtaagagtagggttttgttaaaatccctagacctgaatgtgtaaaggagagagggagacagagagctgtgataatagcactgccgggcaggacctgtgatcctcaagggaaggtcacagccacgtgttaacccaacatggatgaagccagaggagtacataccaggtggaccttccccttttcctctaatattccaccattgttctccattgacaggaatcctaatgggacccaagtagtgtcatcctacaggccagcttccctggctcagaggcagtgtggggaaaagatagaggatcagcagggccaaatgggagattccagcaccctctccttggggatttgacttctatctgataagcccttcagagcagggttattaaacttctgtgagccacagacccttttgagaattgaaaactaataatctgtcgacccagagacatgcacatgataacatacacacacacaaatgtggcatgcacttttagggagcattccatagttccttgagtccatcctaagtctcaggttaagaaagtctgctgtagtattagtaagatttaggaatcttatttttgtctcacatgaagctgttaattctcctttctttggtgaaattcaaaagatccaaataaaggtgtattttatccagctttgtggtctccatgccaatcatatagattgtctggaaaatgtccagaatatcaaggcaaaacttgtcaagaaatccacatttggcaattgtatcaataggaaaacaatttacaagcatttatttaaaaaatacatttacaggctgggtgcgttggctcatgcctataatccagcactttgggaggcagagacaggcagatcacgaggtcaggagatcaagaccatcctggctaacacgtcagggacgtgttaccccgtctctactaaaaatacaaaaaaaagaaaaaaaaaatagccaggcgtggtgctgggcgcctgtagtcctagctattcaggaggctgaggcaggaaaatggggtgaacccaggaggcggagtttgcagtgagccgagattgtgccactgcactccggcctgggagacagagcgagactcagactcaaaaaaacaaaacaaaacatttacaggagttaagagttttaaatggaggtaatatgcaaataacagtattaaatggcttttagttaaactattctttttcactataactgcaggccaaagacatagttctcagttcaaagccatttgttagacaaccaactcttctattacaaactcttctagaagataatttggaggtgggctgtattaactagagatgtttctaaagaaaagtctttcaagttttggaaaaccgttgaagtatttttgtcattggatttctatcagaggcacaagtatgtgtcctacaccaatgactggtgcttcattaggggtatatccatacatacccataaggatatatatatggatcatggccaggccctaagggaaaggctgaaatctgtgtagcaatataactgtcagattgacacaggaatgggtctgttgatattaacctggctaatcattttgctaattggacagccagttgggccacagtgcaaagtcagatcagttttcactttaactactcacacagatgatgtttgactcaaatgtattactttatatcaacacactgaatggctgtaaaaataataccacatgtgctgctgcctctttttaataagtgtcttcctcaattttccctgttataatagagattttaacacacaaaaattaaaggttatttggaggatatcagttgaaaaatgcacccataggattctggaaattaatctggctaccagtgcatctcctaacataactgctttatcgcttgtctccactttaagcagctctcattcaaattgactacctttgatttgctgctgaaggagcactgtgacctttctctctgctttcttcatccacataatatgaccttccctcctgccacccacaaaaaaaatatttttttgtttgtttgtttttgtttgtttgtttgtttgtttattttcgggatggagctgttgccaggctggagcgcagtggcactatcttggctaactgcaacctctgcctcccaggttcacacaagtctcctgcctcagcctcccgagtagctgggattacaggagcacatcaccacacctggctatttttttgtatttttagtagagacagggtttcagtatgctggccagactggtctcaaactcttgacctcgtgatccgcccgcctcggcctcccaaagtgctgggattacaggcgtgagcaccgcgtccggcccatttatttcttttattagcaaattttcacctgaaaaattaaagaaaaaattgcaagtttccgatgtagagatgaattagcaattaaagccagattgttgtctgccagttatagaagacacccctcaaagcaaggaattttgcagtgggtttagacaaaagcatcagaattattgttcatatttcagatcaattgaattattgtgacatgaaaactagttagacgaaaagttttaaaactagaaataaagctttgctaatgttcacaaaattattaaaaagagttacgtcttcaaaaatgagttgactataattaataagagttgcagcattttttggctaggtagcttgctaccttatgggaataaaactgctctcaaaattttgtgtttgtttctttaaaagatttgtttgttttaaaagaattatttagaccctttagtcttttcgatgactggaatattcatcatgttactttataattaatgatcaaaacttccaccacgtcaaactctcaactaggaatcgagaaaattgatctatttatgcttcatcttctttatttctcctgtttaatgtatagtgaaatgaacagtgaaacaaatggcggaaagagaatctttctgcagtgatacatcttggtactgtgggaaaagcttatccacatggaaaaatatatcatcctgaagaatgattgactttgaatgtttgcattgggctgaatagaacattatcacaagttgtcctaccagattctttaataagtaaaaaaggaaaaatatatatatagataatggtaataaatttgcttctgctgtttcctctccctgaaatttccttttccttcccatgttcacccatccttatcaagactgcctgggtgattccaagttctcttgcctaaagctccatttgattctctccaaagagaattattcttctcatcttctgccaccaaagcttttcatagcttgatctccttgatcttttcatgtcataagcctcaaatgctttatatggtctcacgagctgttatcttactaagttcatttataatatggttttctaatggctaacgactttcttctcttgtaaaactcttgaggatataaaacatctttttcttagaattacttttgcacagaacactactttcctttcagataataggtcatcaagaaattatcagtgcatccaattggcacccaattataataacatttttcaatttttaaaattgggctctctctctctctccacacacacacacacacacacacacacacactcacacttgctccaagcaagtatgaaacccaccagggaagacattaaatcttaaagctagggaataatctcttttgactgcacatatcaccttttggacacactggggtgggggttggaaggccacaggcagccctgtccctgtggctttgatggatgcaacccaagcagctgcttatataggttgagttgagtgcctgaagctttctttcccagatgggttttgcatgttgttggggacttcgcagttctgggggcctggtggtggtctgttcccatggcaacactgtgcattgttctggtggagagtctctgtggcaccttagtcacctttctgctcaacattgctctagtaggggctctctttggtggctctgccccaacacaagtccttggccgagcccccaggctttctacaacatcctttgaagtgtggctatgaagcctctgcagctcttgctttctgtaaccctgcaggattagcagcaggtgaaagccaccaaggtatatgacttgtaccttctagagatgcagcaggagctacacctggatccatcagagccatgggtgggatgtgggaactgtcttgagatagccatagacagggaacctaagtccatggagagtggcctagttctattccctgaaagcattctgctcttgtaggcctctgggcttgtgatgggagaagcagcatcaaagaactctgaaatgcctctggggtctttcttccattgtctggaggaataggacctatatccttctgcccatgctaatccctttagcaaatggctgcagggctacacccgtggtttccaaaccttaaaacagttttcactctttacatgaccaagcagagaattttctaagtcttacccccctgcttttcttttatttataaattttgtttttaaattatcactttgctcttaagtctcaccattagtggccagaagtaaccatggagcttcttataaattttgcttagaaatttttttctgccagatacctgagtgtatcactctcaagttctgtcttctacaaagtcctcaggcatggacatagttcagcgaatttctttgccaattcataacaaggatggtctttactccagtttctaataccttgctccacagtgctatctgaaactccatcagactggcctttactgtccatatttctataaacattctggccacaaccacttcatcaatctctaagaaattccagactttctctagttttcttatcttctaagccctcaccagaatctagcctgttccttcaaattcttccaacttccacctaccacttaactcccaagctacatctacatttttaggtgttcattatcagcaacgttctacttcttagcaccaatttcctatcttagtctgatttttgttgctaaaaacagaatagctgaaattggataacttagaaagaaaggaatttatttcatacacttatgaaggctgagaagtccaaggtcaaggggctgcatctggtaagggtcttcttgctgatgagagctctctgcagagtcctgaggcattacaaggcattgcatggtgaggcagctgtgtgcaagctcaggtctctctttctcttcttataaagtcaccagtcccactcccatgataacccattagtctactatcccattaatgcagaaccctcatgacccagttacctcttaaggccccgtctctcaataatgccacattggggcttacatttcaacatgagttttggtgagtacaaatattcaaaccatagcacatggccaggttaacttaccaatattcttggctataattgctgtggacatatggaaaaccagtgttttattctcagagctgcaaatgtctcatgttaattttagtcatttgtccattcagtagctcaaaggactaaactaaactttaaaatttaggaagaaagatcagagcaagttttgtattctattgacctcaatggctttaatgtgtttattataagccctttaaggaaagaaattattcctttcattaattttccatcataacatgctgttaatgttacttaaatataattgaattaataaactagtgatataacatttttaagattgctattgcaactagatgatattttgtgaattaaaaatatattaatatgactctttaaaataatgtactctgcctcatttaggtatgtaatatattagaacctaagaacagaattgcctatggtgatctcagcttgtctttagttaaaacagaaactattactacagtccaacacgttggatagtagagcgctgttcaaccatgtttactgcccacatgaaaaacccactgtgtcctccaaggccttttgcaaactagagttcacctagaaatgcccttttcctcattcattatggcccagccacagtggccttttcatattgtttctctaacgtgcttgtttgtgccataaaattttattcttatacttaccctcaaatcttctcaaagttgaccttttgttatcattcaggtctcaatgcaaatgtcatgtcttcaagatatcttccctgaagataaacataagcagcttccttcagtcattctcttttacatcctgtattgttttgttttgttttgtttttcgagacggagtctcggtctgtcgcccaggctggagtgcagtggtgcgatctcagctcactgcaagctctgcctcccgggttcacgccattctccttcctcagcctcccgagtagctgggactacaggcgccggccaccatgcctggctaattttttgtatttcgtttagtagagaccgggtttcaccgtgttagccaggatggtctccatctcctgacctcgtgatccgcccgcctcggcctcccaaagtgctgggattacaggcgtgagccgccgcgcccggcccactctattttgattgcctaatcagatttatcaccatttgaaattatctagtttgtttttattctcaagtccaatgaaatatatatagattagaagcttcatgacaacaagatccttattgtttgtagctatttccttactgtctagaatagtgtaatttattgcataaaatagaattctaaataagtatcagctctttttgtctatatccctagaatataagtaactactggaagtatacttagatatggactatagtatatgattttgttccaagctatatagcaaaattcagtagcacatcatcaatgactcaagctaaatgtaagttgaaaaagaagaaatatttgtttttagcacctaattcaaatttgggcaaaaggcagtgtactgtgaatacttattataatttggttgaaactgatctgatgtggatttaaggtgcattagaggtgtttggaattgaagacaagggtctgtaaagataatatattattctagacttcattgcttccttaaaattgaaactgttctccatgatcctcctttgggaaaggagacttattcagagtgggggtttgcttgcatttggttgttcagctgtatatcaactggcatgggttcagcagaggtctctgccattttgcattcaatcctcctgaaaatcaccacccaaatatcctacaacagggatcaggcttcggtttaagtgctgctccgctcacatacttgtgttctagtcatttagaaaagtgtgattaaaaaccattatgtgccctaacagatgtgaccttgaagagtctactaaggtttaaaaaaaaaaaaaaaaaaggtgcaaagcaatagtggttagactaacaccaggaaagtattatatgagctgaaccacattgaacaacttctcattgattactaccttctgtttcaagaaaaataccacgatgtttaagaatgagctgcagtgttcttacatcagtcccctttccccatctcactacttccctggttctaacgaggaagaaattaaacatagatggttgctgaattttaaatgctgttcattgaagaggaattattggattgttaccatcttcatttcctctagtctcagataatttaatccatgtgccaagaaaatacaaaacaaacaaaataaagccatggaaaccatttagaaaataagatctttttatttaaaaaatctctcttgtaaacagtaaagtaatcttaggaaacaagttagctaccttttattaagcatactgctcctgttgactgagagttttgctaatttccctgagagtttacaaaagcatctcagtgtttcatatctaatgtaatatgctgtaccttgtccacaaatatggaactacttagttaccagtgttaaaacatgtaatataaattgtcaatacagcaggagagctttttttaactagtaatactctttcctatttgtaatgattaatagattattctgctcttctctccacaaatattttggtcctactcgtgaccaaagatatatatttatgacatctcttgagcaaaggatggagtctgtaagcctgagaactggacaactgaacttggattcaataataccaggcataaaatataatatagtttcctggaaaaagtctattagcaatacaaatatgtgcttcacgaaagtttgtagaaaaatcagaataaactattttttcctcaattatcatgctgaataatgtgttttatcttcaattttatttttatttgatatggatttatagcatgcatagatattttaagcaatatgactataaaatagggctgttgcacattgcagacggtaactgtgaataccttgcattgcaaagaatgaaacttaaagaaaagtaatcctattatagtaaaggctttatacattgcacaatgttttgttaaattattagcacttttcagatactatcaagtaaaaagatattatatagtttgagacaactttttttaagctaaaaataaaatttatttaaatggtccttgatatatcctgtaaaacaagagagaggtaaaaataccagtagtaattatacccaactcttgcaaatttaagtagatttgttgtttgaaataagcccccacaaacaaagttgcctgcctcttctaacaatggccaatttaaaaattactttgaagtttacaaatagtagtctgttaatgtgggtaattaaaacaacatagcatttcattttaattattgaattagtatgtgtcatgagggtgtaaaccagggacctgtggaaaatcagagtcaggacaatgttatcaaagaattgaggaaagtagttacggttgagccaaagacacttcatcatttattaagttggtgcaaaagtaattgcggtttttgccattactgcaactatttttgcaccaaccgaatagttaagtcatctttgttcttgaggcaaactgagaattaatggtatccctcagacaagagttaaaaactcatcatataagcacaaaagaaacaggaagctaaaggattgttttttaaatcagcaggttcaagatggcaccctccatcagacttctgtgttcccagccccaccgcaccaaggcctctagtagaagctagcaaagaaagtcataagctcaccacacgtagctcataaaaacatggggtggtaaatataattcatttacacgcagtacctagcaacgattcagagcaattttaagatttccaaggatgccagaggaatgcaggtgaatgtgatgacttgtaaggtgctttgaagctcaagggtagacttgtcatggggcagggaagacagcaaaacccaggataacttctttataactcagagacattggtgccaatatcgactgctgagtgaaaatgtacagttggaagataccgtgtttgagctggctagacagaaattaattcttggatatcctacatacaagaactcattcttttctttctaaatttgtatttcctaaagaatatattaggaatgttcccagaatgttctctgaaaggtctaaaatcttgcttggtagaatactttatatagggtcttttgatggtgagggggtaagagatttttgtgggaaagtgggaaaaatagaggataagggagtaagaagattgtagttaaaacaaaaaaagtctaggtcttaaaattgcatctgtccttcaacttcaactattatctaatccttggcaaatcacttcccccatcagaacctcggttccctcatgagcaaaatgaaaataataatgacttagagaactcttgacaagaatcacatgaaacaatgtctgtaaaaggcctaatggaatatagtactcttaatttttcatttcattaaattcctttgaaaattcctaatctgtctttcctgaaatgaaggtagagtatagtactatattttttcgttatctattttggttaaaatttgaataggaaacagtatgaacccagacaggccaaatgtagtagtgatacccagactgtatgtgtgcttgaaactaagaacacttaaagaaggcaagaagtaaagaactcccatcatgcctagaggtagcacagccttcctgcatggatatttcaacagaaagttcacagttcttgtaggaattggtgccactctgtatttctatgtcttataattgctaaaaggaatagataagcagtgcagtggatgggtttattttcaagtgttcttagtgcataggatagggtttgtaatgataagataatgttaagaaaaatccataaaataggagaatgagagagtgaggggagaaggtaaaactcattctgttcttgttctctgaggtgaagcttgattgaaattttctgtgggtgagttgttacgtgaagcatagttctagaaggtggtgagaagttaggaatatacgcatctctgtttcactccagcccagtaagtcttgactgtacagctataagaaaactctgtattatatatgtaaaaccccatcgcccaaagataacttccaaattaaagaaatatttttcttctctctttaactataggagatcttgaaacctttttgcgatgcatttccttctactctgtcctctagcagtcactaaataatacgcttttacctacagatggaagcaagtttgattttaaatgaggacaatttagataaactttgggacctgtgtaaaatgatatttagaatattcacgaattctgatttcacacagttttcaacaataacacttttgtatttaagccaatatgattatctttagaatactaactattccctctaataataaaacttttttttaaaattacacatagtgttacaagtttttacaacttatataagattattgacattgactcaacccatattttgacaccattacccatacatgcaagacatatgtttgtggagatacacagtaataatctaccttatagtttacaaacttggattttagtttcttttgttctctttcagacaagatccaactcctgttacctaggctggcgtgcagtggtgtaatactggctcactgcagtctcaacttcctgggctcgggcgattctccgacctcagcctccctggtagctgagactacaggcatgcaccaccatgcctggctaatgtttgtatttgtagtagagaagaggttttgccttactgcccaggctggtctcaaactcctgggctcaagcaatctgcctgcttcagtctcccaaagtgctaggattacaggcataagccactgcgcctggcctagtctttatttatttatctatttttaacgaaagacattgatatctctctcttctaacagtgatggtactggtatatgatatgtcaactacactcctgcagagctgcaagtatgttagccttggtaaatgagagacatgagtaaacattgatcatatggcagatatctgacaacttacagataaatctatatttgtaaaaaaaagttattctcaatttttttttgctttgttatatttcacttaaatgggggaaccaaaaaagtacatgtaaaagtagttattcaggctaagagttcataatattaaaagagctttgcttattttgggaaattttgcactgataaaaaaaggcatacgaagactaagttaataaaaatttatttatagttaaaatacatgtgtgattataaatgtctatccctatattgcaacatttaattagtatgaatacatccaagtttaggtcttcttgcatattcaatatggtaagtattgtttcaaaatgctttaaagaaaatgtttaaaatagtttactatgaattaaaatatttagcagccatgaagggataagatataaggacttaaattgttattttgttctttaaataaatacattgaactgattacaatatttttatacattttgatgtaacaaattacttcatgggatataacaggaaaccaagctaattttccatcaattgcactgttgaagattgtcctactgtaatattttgattttagggcattaggacttatttctagcagaatacgggaatagaagtattcagctctgacatgatcattcgtttctgtctcaggacctaggtacattttaatagatgggatgagagagaaagggctgttttgtctctcaaggaattgctaaaccagatgttgaaaagggaggagagatttttaaattttagttgaaaagcagtatccaatgaattaaaaactgatacccaatcagtaacaatgcctccagccacatagctttgggcacttctgagtccacctctggccacttctttactcctccatgaagtgacttttccaggtcacttcttgttgtatatttgtggaggatttctactagaagcgtgcagatcaccatctgctccacagatcaaaggcatccatctcctaagttccccactgaaacaagggtcaatgttggaaaatttaattcagtgaatgccactcataaaaatgaattgcagattttaatgaaccttaattttcaaaggaatttattctatgatatttagctaaaaataaaaatacaataatataatggtataattagttttcttaaattagtatattttctgtttggtgcctgatagagggaaaaatggcattgttgtacttcgaagacgtttttcttcattctgtcttagcaggcaaacttttttttttttaaatagtatttacacataatgaaatggttataaaaaatctaagcttattttcaacacgtaaagagatgtttctgagtgatgtttgtgtgttgtaaatttaagcaacctttccttaactttgaaatttttcaaactttgtatctttgaaagatttatgttaaaagctgaaaacatcaaaattaagaagccgaacccccaaatttctgatttttaagatggaaagccatctgaacttttacaggattccaacagggggcagtgaaattccacagatgaacttgatggctgtgctgaaaaatagatgcccagaatgtaaatctctgaagagaaatatgtcttaacacagctacctcaggaaagggggaattattgcacttaattaaagtgtattgacaccatatgtggccccacctctcccactcccctttttggattcattaagaattaaaaaaaaaatcagaaactagtaaaggcaatattcctatagagcctgtgacttaacccttaatcattaatcctacaaaaattacacttaaacaaaaagctagttggtaaacagaaacctttcaaattagacaatttatgttcattatctctataactcaaaggaatgtcattggactgttttgtaaaaatagtattctcttaatgacagtttgtattttcttatggaatattttcaacaattttaaatgacagcaaagctctaattatttttgccagtgaggtttacataaagatttgaatttttttagatcatctgaaaaaaaatagaaataatgtttgtatgggtctcattccccatattttttaaagtccttgcattttgaataaaatacatccattagagttaaaagtgaaacctttttgttatgacttggacacttatttaaaaattaagctaaatttgactcttcggaaaaatgtggctaaaaagtctgattttaagaaaccttttaatacactgtcttctttattctctgtcacaactcttgtgttctttttgttttttaactgagtttgtactttacttcttcaaaacacatttggaggcagaaatatatattatcatcacatttgaattagttctagaattaacacctaaaatctgaattttttgtattctaatgaaattggtttcttctgtatgtattttaagattataatattttatttaatatattttttatgattgaaaaataataatgattgtagagcatttagaaaacacagataaccaatataaacaaaatttaatgacccatacttctaccagactgctgtcagaatggtgatttttttccctccttttttatacctgtataagaatatttatttaacatcaatatacatttattataacatacatctcacatatgtttgtatatatttttatacatattaatatatatttcatatatctgtgtatatacacatatataatgtcagattataccagctacagaattttataattttcttatttttaccaaatattatgctttgtagactttcccatctttatgttatcactatatgattttaagtaggtacaaactattatatcatatagatttaccataattcatttatttttccttgtagataaataatacaactgaaaatgtagtagcctacaaattgagaattaattctaaagcccaaagtgttctatggtatcagttgagtcttttgacttaaaacctctgtctttgaaattaggtccgttcactaatctgagtaaacaactagtaactacaatttaaaagtcttaaaagggaaggaagaatattgactgtatgctctaagagatgagatacatattttaatgactatattttaatagcataaagaaaggaaggtagagtttgagactcttatttatgtgattattacatgtgcatgcttttgcttataatgaaaccttcttggtccttttgttaaggtgagacagactttagaatgaatgccatttttcaacattcatatgccccaaaatattttcagatactttttctgctactgtacaaaacttaaaaaataaattcaatatttcattatattattcatagccatacatttagtaactaaatttgaaagctaggtacaaaatatttaaaaatctcacaaagttcggggaagctaatattaacgaaaagtcttcttgtgagtagaagaagttcttaccctacttccataaattctagttttcaatctgctgtatactgatttattttatcatactgatataagaactttggcatggcttataaaataactagatatttgacaccaaatacagaatgaatacagaatgtattgcatagagtaattgtcctttcgatttttttggaaaatattagtttaggtagctatataaatatctatttctatatatttatagaccttgcagtttttaaaggccttttatatttttggaggaggtagaggaaaatcagaatattagtattctaatattatatgtgtgaaaacttagaattggctgaaatattgattaacgttggtagttattagatcaccatgacatagcatgctgagaactgaatcctctttgcagatgggtgccttagtgctcattccactgcaacataacatgttcttttaagctactaaacccttcatatttgtgtctaaataactgcatacatcatgcttaatctgtaattatattgtatattaagtataatatatatgtatacacacatgtgcatgtgtgcgtgtgtgtgtgtatatatatatagagagagagagagggaatacaaaggaagcatatagaaagtgtatacaaatgaaaacacctaactatatatacattgaactattttcagctcataattagccaaagaaaaaataaatagtaaatttaagaatcctacatttctttacactctggcctgtggattatttttaaacaaagaagcattttcagccttaatcatagctctgagtaaatgaaagcattcctgcacatttgaatttcacaggttttgtatttcacactgggagtcagcctttcacagatttttaactaccttaaaaccttgttaactttcagctgaaattgctgttttacaatgtcatgttcttgtgggaatacaggatcttttagaaagcagttttgaggaactctattcccagagcaatctaaatccaaagctgggtggaaacagtactagttggtagaagtaactttggcttaaagggcaagctatgtttgctatgtttacagaccaatggtaaaataaaacaaaggtgagttttctttaaaatcaaaatgcacgagaatattcttctcattgagaatgacaaggaccagctctgttgcagctgctatattggggtataccagccgcttgtaataccttctttctgctactgcacatgaggaaaggggctgcaacttactggtgactcctggacagccgatgctctccatctgctcccacctggcgcttccctggatagccacgtgcaagagggagtgccagtctgagatatcagagttagcctgcagctgtgagctcagttatagtgttgaaggctttaattctaagggaaaatgaaaagccaagttgggaaccacctgaggatttcaatagttagtaggtaaggaaaagggctcaggacgttcctctttgaagtctaccaaatggagaacaaaaggagagtgaaggctgagtaggaatcagaacccttaaggatttgagaataggcatttagatcatgtgcataaaatatcctagcccataaggatgtggtttacagattatttatttatttatttatttatttatttatttattttgagacggagtcttgcactgtcgtccaggctggagtgcagtggcgcgatctcggctcactgcaacctccgcctcccgggttcacgccattctcctgcctcagcctcccgagttgctgggactacaggtgcccaccaccacgcccggctaatttttttgtatttttagtagagacagggtttcaccgtgttagccaggatggcctcgatcgcctgacctcgtgatctgcccgcctcggcctcccaaagtgctggaattacgggcatgagccaccgtgcccggcctccagatatttttaaaaaagaattttgtactctaacttccttctaaaccagtggttcttaacctgggaagattttgctcctagatgatagttggcactgcctggagacatttttggctgtcacctggagggagaggtgctactggcatctagtgggtagaggcaaaagatgttggaatcatcttaaaatggacagaaaagcctgtcccacaggcccaccccatgacacagaattgtccagtcgaaaatgtcataatacataagttgagaaaccctggtttaagcccacttttctggtcatgtgactatgtctaccaagtaagggcagctagttaattgtagaaattatatcaaaatggaaatacataactgacatacaaattcttagacctacaatgaaagcatcgtgagtctgaaattatttagttttgtgaacagtcaggagtagagtacttcttgtatttgtcatgattgtgtgtttttcaggactttatcatcctcttataaatgttcatcttaaacagaaaaaaaaagtgaacagggattaagaatgcaaatttacctaaataataaaggaaacaaaataatagagaagtttcaaattaactaagggccaaaaaatagatgtggaaataaaatattagtgtgtctggtaatgtaatatagttttttttccctctatttttaaggcacatattgaactataaagaaaaacgcatttggtttgtctgagttgcgctgcattcctcattacaggctttcctctcctagaaagctttctagacctctatgaaacagacattgtggggtgtgaaactgtcaaatgcagacaaaaggcgtccaaggggcctagtgttgcattagaaggcacttgttttccatctcaaaatcgagcttgcatgtgatgaagtctgtttttttctaaaacttggcagcagctgaccagtaaaatttggtccttgccggaagtgttagctacagcggtggcaagggttaatattaaacccaccacagcattttgcacaatctcccaggagatctttcaatggatttccactgccactggaaataatggctcgcagctgcagcaacccatagtaacacttgatattcccgtcgcaagcggaccagtgctttcagtggaaatgagaaaatcgctagtgcggtgctgtacattgtgcctggggtcaaagttcccaagccgtaacctaaaatgacctctcagcccgacactcagcctcggttgcttctggatgtgtctattatcgcctcattttatgaaatgtacatagtggcacgcgtgtataaaggtaaaagccagtgaagagccctagggaacttgacattcctggtacaaagggaattgatttctgttttttcacagagtagttttcagtcttcttaaagggaatttagggtattctttcaaggttgtggaaaaaatggccaaatatgtcataggatttaaatacaaaagaatgttcctcctttcccaatccctccatgtctctctaatccattggtcccagtgctaaaagtacatcatcattggatatatcattctcttgggataaaactttgaacattagaaacaattggtaaaactagagccacatccagagaaatatgacaaaccattatttagagaaattctcaagcagggcagttcctaggactctggtactgttcgtacacttccctgctccccatcatcggagaggtcagcatttactcaatcaatcattcacttatgtatttaggtacttgtttattcaatcattccttcactattcatgcattcactagatagactggttgcatgccaagacattaccaggcagggggaagagtacatggcctatgccatttgtctgggcaagttcctcatttagaccagctgctctggagaagtgacctctcgggctctccagatattacagtgatttaaatcgagcacaaccttcactgcctccgcttcctcgcgttgcaaattatgtatctatgtgtaatgttttatttttatattttgtattgtatattttaaaatattatgtagtatatatatacacacacacataaatagacatatatatgtatttgaatgtgtgtaaaggagctttgtggagactgctctaggcatcccacaattctatgccatactgaaaactggctgtgacagaattttaaagtgtcagaaagcactggagctactctatgatgtcatggaggtcccttgagaaaatgtcataaagtgagttgcatgtggtgataagaagccactaaaataaacagacttctctataattactaaatttctcagaaaaacaattagagtgtttgagacattttgtatctgtcttccactgagttcaaagtttccgctccacccattttctaaaaagtgctagttgaaattgtgcagcataaccaaaagaaaaaagaattagaggcccctttggagtatttgacagaaatttttgctgtgattaattttcttttaaacagttgggagctctgaaataaaatggaataagtggacttgttccatataaaaaacacaatcactttcaaattattttgcatgatgtaaatttttagtgttataataattaaacagcaatcttgtattacagtcagtcatatatatggacgtgttatatactgtacatctacattgtatatcatattatgttattcaaactacacatgcatatgtatgtatatatgtgcatgcatgcatgcatgcatacacttattatatataaactctcataattaattaatttacatctttcctcacaagccaagcttttagcacctaaaattccaggttaaaagtaattcccatgtcatcagattcttaggaaaatactgaaatgggaaccactaagctttcactagagcatagtttcatgtgaattaaatataaaggaaaaacaattttgatagattaaatttgcatttttatattgcaaatttaagttgcaaaactaagatgataggttaaaatggacaccttgacaacattaggggcagacgcaagagggagagagaaactgaaagaggatattggaggacactgatatcaaggacacagtccactgacttcacaagtttgctccagtcctgccttcctgactgaagttcgagaggctctttgggttaaaccccaatcaactgttccctggtgtaaagaaataatgtattcctggactctaagctactttttagtaaaaataattctattcttatttatatatatgaccactctggagaagcctgaagctttattttaattttgaaggcataatagaggactaaattatattatgtcaaattgagttacatgacaggctctcaatacctaatggctttgctatttttttttgctgcctcagcaaagcctcctcaggaaccctcagggacaactactgtcttctcctctaccctaaaacacttagcttctatttctttgtactcaaatagcatcttgttctattgtaatcatagcatatatttccatttaggtagatttttatttacactggtttttcctctgcctttagagaatgcacttctaggagacagaggtgagattgcatttatcaaagtagcatcagaatcctctggcaccaagtacacactcaataaaatgttgtggaatgaataagcaaaaggataagtgaatgggtcatttcactctgacttgtggaatgcatgggcttgtgtaacacctgactacaaaggagttttgcttatgctgtctcagcaaatatggtctttaagaggcatgcttatagcacattatacatctctaaggatacagagttgaaagggatggccattctcctaggatgctggagaggaatggctgaaaagctctcattttataaataatctaccaaatttaaaccttgttcaaatgtttataacagagaacatgtctttagtggttgcaagagagcaatgacctcttgcatctattaatattctgccaacttttggttactaaatttgtcatcagggatgaatgttattttctgcgccatatagaattttctgctagaatttaagctaaatttagagaaataacatacagaattatgtgtaagcttcgctcatgtgtgtataaaaataaatactgtgtgtgtctgtactcacgtacttaatttggggaatttttaaaaaatggatcagcctttcttatctgcactaggatgtgaggagcagaaggatagaaaatattaaaatgatctattgtttccttggaatgcattattaaactttagtttttattaattttagtttttatacatttgtgttgcttttgaaaccaactttaagcagtgatgaagtcaccttccaggtgaagctaatataatgtccctcccatgttgccactgagtatctaaacttgttcaatgttgggaatagagaacatctctttcccttagaacattaacaaagcatcagtttatgactcagattttctgcagaattaggaagttaattaagagtcttggtttcatgagaatgccctcgtaacagtagtcaaaataggacttacaatggcagaaagagatatggacaaaatcgggttacagagaaggtactttattacatattttctattcctttctaatctttttggtctgcaagcagctgcagacctccctagggagcaggcaaggcagactggcagctggtaagcacctgttgaagtggctggtgtccattctgattggacaggacatctgtttctgattggttgttgcccatgctctaacagtcattagatatcttcaatatcacccctcagaataggcaaccatgctatattcttgatacttatacatttgatttgtatagtaaagacagttatctttatcaaaatttcaacatagaggggaagggttatgaagcactttgaaacaggttagatgtctaagttttagaatagttttaagaaaaatagaacaggaaacaatgcaagttactgattaacaaatttatcttaactaaggcaggaaatccattcattacatgactaacaggcaaatggatgcatgctgttaatgactttaaaaagttatgattccaacaggagattaatatccttatttaactatggattttcatttctacatcttttttcgtagataatataagtaaaattttatctgcatctatatttacaaagagtaaatgaatggagtgtaaattaatgaggcttcatcctattttcacttcctactcttgtcaaaaatataaaatcaggaaaagcagagaagtattaagtgccaggagaaagaataggtatatcttggaatagggctgaatcttccacagctacctgacattcgacatccacttaaacaactaaacagaaaatggtactccacagctataaaaaaaaaaaaaaaaaaaaagtcaggctgtaaagctacgcttagtggctagacacagctggaaataattgagaaacagagtacagtgcaaaagagtttaaaaaccacatggtctcagtgatattttcatagtgctccaagcaattttcttcctcaagtcaaatggtttcaagactctccagctcaaaattacctacaaaatataaatgccaaaaaaggtaaactgcaatgcattaggacaaaacaaccagtaacccttgaggaaatgccttgtcgaatttgtgaatgggacacttcgtggtgcagacagccattgtgaagctttaacccaaactgtcgatgtcccttgtccacccagtgaataggataagtaatgattcacacaaaatcctgagaaacacacttgaatcacctgactctatttatttctgtggtgcagagtggggggtcctagaaaggggcctatggcagtgttcatataagtaaattactgtttactatgagagtgcttctgccacaatatgcaaagtcttactccaggtgattttgtgggttaattgacatgaaagtcttaggacgtctttctcaataaaatgtataaccaatatcatcatgaataaggtaactattatgaacaaactaaacaccaagaattcaaaaattaaaagtcttatacctaatttgtgtctctaattttgctcataattggtattgataagagatcttatctaatgagattctctaaggggaggataccacacaatttttagttttaaaatgcctaaagatgaaataaggttatgtcacatgtcactcaatgataggccattctttctctagctaattaaatacattagcaactatttactcagcatactacatggaatgaactttttctaagcaccttacgtgtaaaattcacttacacgttttaaaaataatttattatttccatctcacagataagaacagtaagtttcagagacagtaaacaaataacacatgatcataaaagtcatctttagctggccagtgatgttaaatttccattctctttccaaattcgtggaagataggtatttcagaaaacagtaaacctagtataggagttaattatttctaaagttaaaacaacaaaaactttgccatgttgcagtctgtcatttgtttccatgaaggggaaatataaaattccaaatatttcccaaattaaaatatattcgggttttgatatgatggaagcaagactgagatttgggactggattccaaaatcctgggaactgacgatatcagacgaaaatattatgatgcatatagaagaaactaggacatttaaaatgtgccagatgatggtgagtttttgaagtatcacaagtaattatatacaggcactttcttctgctaggcagttgcctaataaagaacaatgtattaggcctctttctaatagctcatacacctatagatggtcataatctacttcctttagttttcaaagacagctaagagaggtttcacctctttctctgtaatcttgacactttagataaagatgatttagaccacaagttggcaaactataaatgggggccatattggctgtctgcctgtttttataaataaagttttatttgaaaacagctagactcgttcatgtatgtattgtctgtggtgactttcatgctacaacagcaaaactgagtacatgtgacagagaccgtctggtataaaaagccaaaaatatttactgtctggctctttgcagaaaggttgccaaccccagacctagacgattatagcatatgttaaaaaaaaaagaagaaagaaagaaagtcaagactattgatgccttggtagacaaagggagacagagttaaaatttcgtgctcctttccagacagtagactggcccccatggcttgccatctgtcattgtaccattacgatcattattgcagaggacatctatttggcctaacagcagtcgtgccatagacagaatttacagaaaaaaaaaataaaagttgccagagcccattagtttgagacaagattttattgaatcttcaccttattacaaaatttcacttgccaaactcagtgtttttagtaagaggtaattatttgtgtaggggtttaaacaaatcccagtggaattcaaatatttttaaagactatcttagataatatattttgtatagaatcaatgttgagttagctataccataaaaatatgtgaagctaggttgaaatgagagaaaaatcactagtagagacctatacgtggtacatggaagcatcgtctttcactatttgaattgtggtactgaaagtgacataacatgagtatttggggtgctttttccctagctgtggacacaaattagtgctctattgtctaagacttaaaatagaccaaggaactttaaaagcaacattttaaaaatggggatccgtccagctgtgttctgagcttgggcagcactgccatctgttctgtaaagcaccacggggtctccactgcactcagttagaagtcagccacctcggaagcacaggcacagcgtcagccaccttggaagcacaggcacaaggtatcagggtgttttctagaaaggacgtcatcaacatggttgactagaggcacccagcactcgcctcttctataaagaaagaaacaacaaccaggtcaccacatgtggaacagtctaagggacaaaactggagtttagcaaagtaacacagaccttctgaggcccagcgactcaggatggcagcatagagaggggaagcaaggcatctggctgggatcagctcagagctgggaagaatttctcattgcaggaaaaggtaagaggtgatctgttgaagtacgcattctcactacaaactcctgcaatcctagctgcaagacagcccacagcccctgcagaccctgagcccagtgggggaactgcctggagaccacatgactgcattgatccagagaggaattggttttcccaacccccaggactcaggctgccacatagcatgtcacaattttgagaatgaagctaccatcagactgcattctgccctgggactcaatagcctctgcatctccacactcctgggaccctagggacatcccaccacacaaagggctaaaattttacaacaccagctgaactcacctgtgcagccatgtcccctttcttgtgcccacacagcacattgcattttgggcacaagcagtctcacacagcgggtattttgcccctaggccagaggcagttcatgtgcatgctcctcttaacctgaaagctgcctgcccaggcccggtcaccaatgctgagaatttcacttcctctagcagtaaggcttgctggcactctccaggggccataagactggcctgcctgttcaccccagaacaaaaccccgtcacactcatgtgtgccccacagtgtcccaaagactggcatacccagagcataccaccactgttagtgatcttgaccccttcagtgctgaagcagctgtgtgtccatgtgtaggcttcagggctccaaggtctagccaaataaggcctgctgccaccaacatttccacccttgctagtaatggagcttccatgaacctgtggcactccttccctaacccccaacaaagcctcaccacagcctcttcaaacagctgcagcctcggccactgagtcactagcagacactgccaacattgattacagatgaggaaatcataaggaaactacacactacatccacccagaaccaaacccaaagcactctacccagcagacgctataggacatgtctataggagaaagtcttcccttaaagagctactccataaaattggaagaagtgacaattccacaaactacacaaatatcaatgtaggaatatacaaggaactcaacgcaatagaaaacaataacaaaaatctgattaaaagatagacaaaggatctgaatagacttttctcaaaagaagacatgcagtggccagcaagtatatgagaaatgttcaacatcattcatcatcagggaaatgaaaatcaaaaccacaacaagatatcaactcaccccagttaaaataaatattacaactattatcaaaaagaaaaaaaaatgacagatgctggcaaggatgcagagaaaagggaactcttaaatgctgttcttgagagtgtaaattattacagccattataatgaacggtatggaagttcctcaaaaactaaaaatagaaccacttggtattcgtccaaaggagctaaaatcactgtatcactaggtatttatccaaaagaatggaagtcagtataccaaagagcaccgccatgtttattgcagtactattcacaatagccaaaatacggaatcaacctgtgtccatcaacagatgcatgaagaaaatgtagtatgtatgcgcaatgcattactatttagctataaaaacgaatgaaatcctgtcatttaaagcaacgtaaatgagcctgggggactttattttaaggaaaataagtcagacacagaaagataaataccacatgttatcactcctatgtaggaggtataaaagttgatctcatagaagtagagagtaaactgtggctattaggggcttggaagtgcacaggagagaggaggatagagattggttaagagatacagaattacatctagatgggaggagtaagttctaatgttctatagcaccatagggtgaatatagttaacaataatttattgtttggtttcaaatagctagaagaaagaattttgaattctccaaacacaaataaatgatatttaaggtgacaggtatactaactaccctgatttggttattttacattatatatatgtatcaaaatagcactctgtaccccataaatatatatataattgttatacattaattaaaaataaaatttaataaacataaaatgaatgttccagaatcccatggactcttgctacttcataccactacgtagcttaatgttcaaatactttagctactaaacagctaagaaaattcttgaggaatgatacagttatattggcactttgctgtatagccatttctgttactacaaatgtgaaaactttgtatggttcaaatcatatttcccaaagtataaatatttgatataatgtggcgtggtctattaaaacattgccagccctgtctgtaatagaggttaaagaggttaaagcagaccctgtatcatgtctataaaataatgagttaacatatctaagcataactgccttccactgtctaatcactgtctttatgtaacttatgtaccccaagtttgactttttttaaaaaacaaggaaacactactgagaggtgttgagtacattgcatcattcagggcattatgctgaaaaataaataaatttacttttaggttgtctgctgtaattaataatcatttccttcacatatttaggcaaaaaaaactgttcaagcatcaataagatatataattctatgctgtgcaaataggtgcaccctatattctttaaatctagtttataccaacatgaaattgattttttaagtttttttctgatgataataaatttaccacatataaggctatcaaagcataaaggttaatgaatataaaaatacacattctgataaacgtttgtattcaagtataatgctttcattaattcttacattttaattaaatagtattgtgggacagagaatagagcaggtgattctattaacagtttgggtctttgaagacacacttgcagatcaagcaaaaaattaggaatctttgcctgaatggacacgacttaaaaatctgtcagttttccagaaacaaatacgatgagttttggttagatgtttcactgaccacccagaccaaaggcatttatacaaatctgagatacacccatccattaaaaggccacaaaacaaaatgccaactagcacatcccagttagcgtggatacagccgtgtcctagaaattattaaatgaatcatctattcctgcttttgtgaatgagctattctatgtctcagttgctcctattcttaaaatagagacaagctggttcttgggctggttatggattctattctctgcccttttttccttctgcacctggggactaagcttgcagtgttgtcttacctgggcttcttggtgcttgagcttccccatggttttgacgaagggaagcactgaaaggagaaaagaaagcaggagagaagggttctatgtccccagtatgtcaccaatgggctgccgtattggcagtatctatgtccctctacctatggccacagctcctaaagggcagcccctctgccatggctacagctctcacttggagcaagtaatgcctttctcttgctttgcccttttgctcagggatgctgtgttagtcaggattctctagaaggacagaactaataggatggatctatatatatatatatgagtttattaaggagtattaactcacacgatcacaaggtcccacaataggctgtttgcaagctgaggagcaaggaaaccactcccaaagctgaagaacttggagtctgatgtttgagggcaggaagcatctagcatggcggaaagttgtaggctgggaggctaagccagtctagtcttttcaccttcttctgcctactttatattctagcctctctggcaattgattagatggtgcccacccagattaagagtgggtctgcctttccaagcctactgactcaaatgttattctcctttggggacaccctcacagacacacccatgatcaatactttgcatccttcaatctaatcaagttgacactcagtattaaccatcacggatgcctaagtggtgttcatccacggccatttcaccatccttggtggctcctttcactctacccacacctctaaaaacagatgcctgctcttaatcagttctggttattattacatggtatcatagactaggcgacttagaaatttatttcttgcagttctggaggctggaagttcaaaatcagggtgacagcaaggtcagattttggtgagggccctcttctggtgtgcagactgccaattctccttgcatcttcacatggagaaaagaagctgagaaagctctctgaggtcccttttataagggtacgaatctcattcatgagggctccacctccgtagcacgcttctttaatctcttctcacttaacccttttgagctcatcatcacttccttcagaaatctgcctaaaagggttattaccccctcacgatctattactacagatatgcaaatatccacacaactaatttgcctttggcagtttttcattgaggattaaatttaaaacaaataaagagatgtggcctggtgcggtggctcatgcctgtaatcccagcactttgggaggcggaggcaggtgaatcacttgaggtcaggagcttgagaccagcttgggcaacctggtgaaaccccatctctactaaaaatgcaaaaattagccaggtgtggtcacacatgcttgtaatcccatctactcaggaggctgaggcaggagaatcacttgaacctgggaggtggaggctgcagtgagccaagatggtaccattgcactccagcctaggcaacagagcaggactccatttcaaataaataaataaataaataaataaaagagatgttgtagcttcatgcttagaaggaacttagttataatgaaagcagtgtgttgatgggactactgtgtgtgatgttatttcgggatggtggacagcgtaggttctacttcttaagttttgaagtctgccactcaggattttggcttctcaattattctaataaagctattaaaaagtgaaaggtcacagaagtcagtagcaaagcactacctgtatgcagaaatgaaaagggagaattgatgtttattgagtttgtttcaaatgataaccagtgtatcagtcactgagaagtgttattttatataattttgtattttttcacaagcttatcaagtatttattaatgaacccatattacaaatgagcaagttgaatcttgaaaaaattaaaccactgatagctgatgcccatcagaggtaatgccatctggttccctttgccatgggctagtatctacttagtttgctacagcctctggtaatcagactatatgccatgtcctcaatcctcgaagcttggaaatcttagctatgaggttctcttggccgtattcccctaggtctccattattgcattcacgatgggctataaactttctagagtaggtctcttcataaacatgctaggatgcaaagctgtgggttcctctgttctaaatcacagaatttcaatatgactctcagcccaaggaggccgagggtagcgggacacttttcagagaatgagtgcagagaaaacaagcatatcttcctagattctcctcaactcggtcagagttttcatttggaggaaacattgtcacgtatttttctatgtaagaacaatgctagcttttgctcttgatttgtatagaaaagttaaaagtttttttttctctctctctcaggatcaatactcttgaaagtcaacagcatctttagcttattgacactgctaatattatatgatattgtttgaaatgtaaaacttagcaagcatttcttcattctaggaagcatttgactcttgttttgaagctattaaagccatcatattagtgaatcacaaacagctaaggaccactaaaaattacctggaagaaatgcattatttattgtttcaaaatatcctctctatacctacacaagtctgtgaccatgtctatatctacttcacatatgtctatatttcttttggtatcgtatccatgtgtgcataaatcatatctatgtatctataaaatggagagctagtgaatggattgcaaacttattgggaatagcagtacaataataaattttctggtggaaatacaccaaatacgattacatcagaattttcagcttccaaagaccctgagagcatcatatggtaataatgcttgtcaatgttgcaaatgatacagattttcagatgatggccatataaaccagtttcattaaaagttaaattgatttgctagttttttcataaaattaacctttctattcacagtaagatattaaaacaaaacactattttagatattttgccagctagaagtacaatttcaatgtgatttgagctattaaataccaaaagaattgtgatgcataaaaaccaatggcgaaagggtcgatagttttgtagcataacatttgtcattatcgtaagattatataaaatcttagtgtatgttttgttcttattacattagtcactcatcccattgctaaaagtaaaatggttacaaatgggcttcatcaaatatacctcctattatcttcagtctctacctttacaaaggctgatttaaccgatcaatttgtaatttttacattattaagaacatattgtcttcataccgttgagaaaagcatctgtatatcatgttctcattccagaaacattgcctctggccaaagctttcttcttaacaacataaaaagtaaaaaatgcagaaaacagctagtcccagaaaatttggtttaaatgtctagcattcctttaatagaaattgtaggtagaatttcatctgtgttagtcagggttttagaatagcaggtagtatgtggataactgtcaggttttctatgagtaattcaattgatgtggaataaatttggttatggttttgtctgcttggtatttcgaggtttttcattttttccattgtggagatgggcccaaatctaaaaatcatttgttgtggcaattttcccccattgatgaactaacccctgtgtcttcctcatgtcctgctttaaaaacagaccatagattatggttatacatgatgaatgcattcatgttttcttcctcccaaaactccacaaataacagtaaatgaataaaaaagacatgaatccaagtggccagcctacaagatggtttccaatgatctctacctcctggtattcacaacctgtatatttcccccacattgtacaagattcataataatctactctgtttgacccatatatggcagaagtggtggtatatcacttctgatattgggttataaaagaatatgggttccatctcgttctctccctctctccctcactctctgtcaaggtggtcaaggtggctaataaatacctacaaatgaaaactcagataaatagtttattgatacccaataatgtttttcttttttttcaaaatgctaaatatcctatttatagtaaattacctctttccttgctcaattacatttaattattatttatagtttcattttcttttaaattatttttctgatttagtcaatataccacttttctttaaaacttaagcaggcactggttgttttctggttttgccacccatgtgttgaacacgactgttcagggtctagccatatttgctaaggtctagtttttcatcagccaagtggtcagagttattttcatattggggaaaatgttagaatatacaacatgtgatgcaaaacatcccttccactcacttatttatctattttttcttccctaaagtatagtacatgcctaatgccatctcacatgtattaatttaatgaaatgcctctttataagaatttcttgctaatgataggatttgagttgtggcaggcaatatttaggatatttatttttaaacagggatgttgtgtgtatttatgggcaaatgatcccatttcccttacagagtcaaggacatttttaaaggttattttcttgtaagtaaaagcttcttcctgagtgtagagccattaaaagtgaatctaatttcaactcacatttaatgtatcaaatatttgcattcataataatctactttgtttaaccaaaggctggtagtgtggttggaattctataagctgtgcatagggtgaagaaaaaatatttacaaaaatcatttgatgtgtttttattaaaataaagtttagtcatttaaaaagctagagcagtagtttattaaaatagtataaggaccagtgacagtgacaaagtgtatattcctgccttgtctctaaggaaagcacaattaatccttcagaagagatttattaacccagatgatgatttcacaatgtggattccacctgatgtacctttgagttaatatgtgttgaattctgaccttggagacactacctcataaggagtagaccaactgtgtgtaagtgacaaaagagtctctgaatgttttactgggaatgactgccatgggcagagtaagccataatgttaaggtcactgatgagacactgacttggctaaccttcccccaacttaaccaagcgtgaaagcagatctgcagccaagtctgtcatggtgggtgaaggaaatttggagaaggcttccctccacagttggctttgaatgagcaacagttggttagcgcattgtgtttatgagaataaaaccatgggcaccatcccagctcagcccagttaacatcatttatttccatgaccaccaagtacaccactcaccttgccaacaatattataaatgttcacatttggtttccaggacaattgggcaaaaagcatctcagcctaagtatcctccacactgtagataaaagagccgtagatggcatggatctgctatatcatatttgcatttatctactacatatgaacttttcttacctgaaacatacaaatgctgaattttataattgaaattgaacttggatgagaatggcacataaattggcaaagaaatattataggtaaatagatggattttttaccacagtcactcataaaagagttcctggaatttagcatataaaatcctactttctgcttgcttagcttttccaattaatgtacagctgagctatggtgtgtaggagaatttaaattatctagtgaaggtcagtatctccgtagtcttcattttcagaagtgaaatgatttcatttatgggagtcatattccaagtcttgtcttttctctattttcctgatatttaaaacataaagtgaatgtaagtgataaagcttgttgatacttaggttcccttttaattaaggaaatagcaacttgcaaactgtaaagtaactttaggagttatgtggaagtgcatgtgagttggggaaaacagctgttccttctagtttatttgctgataaataatgaggatagagatggtagcgaaggagctgttgaggcagtggtgattggaggtgatagtggaaatgatggtgatgggggtattgatgcttaaaggggagatggaggtgatggtagtgattgtgaaaatggcagtgggagtgaaaataagggagaggattgtggggttgtgtataaagcagatggttgtctaagtcctgatgataccattagaggtggagatggtggtggtagaggtggtagtgggggaagttatggtgatatcgtttttggaggtggaaatattgatggcatattagtaattatggaggattccttgatgatggaggtagtggtggaggtggagataatattagaggtggaggtggaggtatttgagttggatgtggtggaagagctcagttgctatcttttcttaaaagtcttttttccatgtgcaaaagaggaaaagaaaaatgatacttaaatatatatatatagatatctatatatatagatatagatatagatatatatatatacacacacacacacacacacacacacacatacatgcacatgactagttttctattgctgctgttacaggttaccacagacttaacagcttaaaaaatcatctcacatatctggcattcagaagtctggattggctcagcaggcttctctgttccagatttcacaagaacacaatcaaggtgtcaattgccagggttctgatggaggtgctttgggaagaatgtttttccaagctcatccaggccattgatcaaatgtagtttggtaggattgcagttcccatttccttgctgactgtcagcaggggctggtctttcttctcatgttctctaagtaaaccccatttagtaatgaggggtctgtcaaatgcttatcatacttctgatctccctgccacatctctctgagtgacttttctgctttaaaggggactcatactactattggacacccagataacctataattatcaccctactttaaaatcagctgattagtaaccttaattacatttacaaacttcttcatagcagtacctagcttaggttagtgtttggttgaataacaggagatgggaaacttgggggttcatctttaaaattctgctatatacatgaaatctcaagtatctgctctcagtttaatgtaccttcaatttgcaaaattgatgagacattgaatgatctaaattttcaacaaagactcagacattaccttctaaatggtctccctagttgcagttacaaagtaatatagtcaacaatctctcctgatttctattcacctagtatctacctgtaggatcattattcctaaggatttaatttcagcattacatgcttgtggtcataaatcttcacaatgtatttgtccttttctgatttcctgtaggacttttgaaacaagaatatgcatatttgtattattatctatagtgcagatatatttgtcatgtcatatggattctaattttctaggaagtggaatcacattttatatttttttcattttttactgaagaggagaaaaggaggcattgttgtcttaatagcattattagtataatatttcaatatcatatttaaaatttatgtgtatctcatttaaaattaagacaaataacagtaaatataaaatctatagacagtgcagaagaaagaagttaaacaacaaataagactagtgtcacagcaaacaaacaaggaaaaacaattcaaaactgaaagccctaccaacttccttatgtttgcttatcaatttgtctccatgaaaacaaagcactactttttacatcttcttctgagtgatgacagtgccttccaaagaccaccagaagcacagctgtagttaaattagttagatttacttttggttgcaaaaagggagaacatgcaccatggggatctgaggatgtcttcaaaagagggttttagagagaacgtgatacagaatttacactttggttgggtaatttgggagaggatctaagaaatgagtttgctctaagtttaatgcttccagaaagcaggacaattttaagactatctcaaagaatcttacccatacaaagaggggactaaaacaaagataaagctatagttggtaaagtagcagcctatcatttaggtaagagagagagacgtttggtattttgtgggtggcactgtgattttcttttattttttaattggttcttaggcaaaattatgaagtagccttgttttatctcttttgtcatagactcaggataaccttgtctaagtctggtattttgtgagatcagttaagctagatatagtggcatggcctaggatgggtattatgccaactttcaaatgtcaggatggtctttttcgattttctttctcagtggtgtgctagacttcagtagtggctttatttctgtgcacattaaacagtttttttgttgttataataaaatagttcttaacataaattgaattaattgatcttaattccaaagtactatttataaatataatcatgatggtaatgatgatgatgatgacaataatcatcatagcaccaatgaatagaaaggagaggatatgagatgggagatgaggaaagggtgaggagaagccatcagtgagtgctaaccatgctccaaggactgccctatcttatttggtatacaagtactatttgaggtagatattgtctcagataaagacaccaagggacaaagagttaaataatttgagggagatagcccataagaagggtgtgtttgtgggtgttttcgtgtttttctacaccaactaattctccaattgtccagacaccagctgagtgtcttgcaatcaattcaattctgacattatctacttggggttagtgttgaattctacaaagtgaagggctcagtcttactttaagactgtctcccacttcacgtgccaagcgctagtccaggcctcccatatttctgaacaactggatccaaatagtgaatttccatgaccctctcttcaggttcagaatttgctaatctgactcacagaactcagacaaacatttaactgtgcttgctggtttattataaaggatacggtaacagataaacagccaggtggaagtacatagggagaagttcagcaggatccctgtatgacagatgcacctgacagcggtaacttatagaatgaccctatatggcaaatgcacttgaatatgtgtttggagttccaagctatggaatccaggagcagcaaacctggagatttatttcttatctatgaggagcatctgaaccctcagcccatcttgtggaacatgggtcatacaggaagttgagaccctttgtttggggttaaatgaaggctaccaggtagagattgttatgtaaactgcatggttttaacaagcagtggtggttcccctctactgcctgctggcgctggacctccctgtatgcaagttcccctcaataaattctgtgtcttgtttgctggctctgggtcttttttttttttttttttttgaaatagtcttgctctatcccacaggcttgagtgcagtggtgcaatctcagctcactgaaacctctgcttcctgggttcaagcaattcttatgcctcagccccccaagttgttgggattacaggcgctgggctaatttttgtatttttagtagagatggggtttcaccatgttaaccaggctgatctcgaactcctgacctcaggtgatccacccaccttggcctcccaaagtactgggattatagcatgagccaccgcacctggcctgctctgggtctctttttcagcctcttgaaccttgtggcattcctactagagttgacaggggtctgtcatgacacccagtgcagaagtttctgtccctgtggagctggaatgtgccagcctcccagcacatggatgtgttcaccaacccagaggaccttgtaactctgtgctttagggattttcatggagatttcatcatgaaggcaagatggattattttaattgtagctcctttcccatttctggaagatgaggtgggggtggagctgaaagttgcacagattctgatcatggcttgatatttctggtgaccagcccacatccaggagctattcaggagcccaccaagaggcacctaattagaacaaaagatgatcctatcacccagaaacttccaaggaatttagaagctctgtgtcaggaaccaaggtcaaaggctgaatgttaaaaaaaaagatgttcctagaatctctagcactcagattacaagagtttaaggagctctgtgtcaggaactggggccagattctctctctctctctctctctctctctgtctgtctctattctttgttctgttctctctctctctctctctctctctgtctgtctctattctttgttctgttgtctctctctctctctctctattctctttgttctattctctctctctctctgtctctattctcttgaattcccaagaagcagatgattcatataaaagttgatttgtttgcttttaaaagactattccccaagaactaccagtggaaaatcagggaagtgagacagagaagaaaagaaggcattctctatgccaacaaatgccaagtaagaggcatgtatttagcaaactcccacaaagcatcaccctatagggaagttctcaaaactgtgcagttcacacattaaagttgtcccagtaagggacgagagggctgggctattcattcctccctacctgagtatcatcagtgaggagttggcaggagagacaagggagtatatgaaatcccaggccccacatgaaggctctctgtgtccccagtgtgtggtccagtgggtctcaagcttcagcaaatcagaatcagctggaaggcttgctaaaatagtttcacattcagtagatctggggtgagactcagtaatttttacttttgacacatttccaagtgcactgcactttgagaagggctgatatagcattacgagtctttaggcaaagagacacagatgctggctattaggattatagcaacgggagctgacccagatgaaaactacacagtgatcctagatggtatgcaaagaacactatggaatacaatggaagcaacgagattaggatctagatctgtctgaatccaaagctggtactctaaaactgcgtgatgacacttctcaattgtgtattacaagaagctacagaataaacccatttgaggcttgtcaagttcaatggcgtataggcaggaggggatgggaaatcagattggatagataatttagataattaacttgaaatatatattaaaatttaaaaatatgtatgtaaatactttgtttttcttaacgtcaactatctagtaggcattttgtgttttcctttgtgttgaggccaaagaactatcactgcccattttcactcccttcaattaaatgatgatggctgaaaagtttcacaagcactacattcctttatcatattttctatgctgtgactctcatatttcaggtttaatttcacataatgttttattcagtaaaggtgattgttttgtaagtcagtaatcaaatatgatttaatatgtgtgattttatatgagctgccctatcaataagctcacaatttatagaagaaacatttttgaatactttgttctacattttggatttagataagaggctgctggtttacccagaatcacaaagtctcaattcctcctgtccaagttgaagccaactaaaaaatgccttgtcacattgggtaggctcagcctagggatatgctatgagtagagacagcacaggtaaggcagaaatgttctggaaagattttaggaaagagggtgccagtgcaaagtttatctatgtgatgctttttcctatgggcagtaggagtatcattttatgcttgcctcagatactacaaaggctttctatatgtttacacacagatcttcactgcccccaagtgaagtaaatacatgaggttttggcagaagtgtgaaggctgttccatgcatttttcatgagagaaatttcaataaaatgaattaacttggtgtcccaaacactatgccaaccaatgacaaggaaggctgtttacatttggattgggcaaccagaacaggttgggttttctacatcctgaggcttccagccagcactttcggttgattcacattagaaaaaaaattcagttaaaataaaaaagagagacctgtttaaaaaactacctggaaaacacatgttaggaaattcaacctctttttatttaaatggaattccttgaaaaacaattaccatcatacatagaatttcagtttatacatgcgaaggtagttgcagctttgacccaaattacctcaattatttacaggccttgattaactgaaatgcccatttagttgaagcaaagtgttttgtttttgaattttctgaacgagggccattcttccataccaactgaacatagtgtataatcctgggaccctccaaacatactgagtaggcaaattataacaatataaatattaattggaaataagaaatatagataacagaaatataaaatatttttctatgtcagctcatcatctcctatctagaggagtgattctccaagtagggtctctggatcagcaacaaccacatcacttgggaacttagtacaaattctaggagccgtagcctagacctacagaactcaaagtctgcgaccccataatatgtgttttaacaaggcttccagctgattatgatacatgccaaagttggaggaccagagttggataatatttaatgactgaatgatagtaatagaactcagaatagtaggtaacacagtgtgatgccattatcagaggtaattttgtgtcttcacaaaatagaaaaacatacttacatacataaatagaaaaaaatgaggcagaaagagacagcatgtgaaatgttaatagtcagcattataggctatttatttttgccataagcgttttgttgttttccatgatttcttcattgaacaaatggttttgtgattaaatcttaaagagaaacacaagagataccccgaggtgtattgtggtgcaataagaaattgtgcctaattctactgtagcaatttacaaagcaacaatcatctagtatgtagcaggtgtatgttgaaggcattgctctcttcataaagtatgggcaactgtcatcacacagcttataacctcattttcacctgcccttaaggtagttgctttaaactgctggcacacagctgattgaaatgtggggaatccctggctgagagctaccttgctgggtgctctctattcacattctttctgggaatggaacatctccctggctctggtttgtacatgtggtcgtcatggcttctttgttagcatttgaggcttttatatatattttatatatgcatatataaataaatattttatataaatatatacaaataatatattatataaatatatgatttatgtatatataaccatataaatatatgatttatatatataagtatatacatataaatagaatatgttatataaatatatattttatatataaaaatatataaaggttcaaatgctaacaaagaagccataaatacccacatttacaaaatatatataaaatctatatatatgtatgtgtgtttgtgtgtgtgtgtatacatatacatatataagtgagccagatggtgattgtgagtgcttatttttgggaaaatatctgaagccatccttgcagagttaaagaaaaaaaagtcagacaaggtctttctgaatgtctgatatgatttgttaaattaaatttaacctagagctgcccctgtacgtatttttaagttgggcctaagtgtttctcattcatagtgaactgtaacctaactgggtgtgtaaacagactgtaagttactcttgttaacgagaagtcacgtctcagccaatcccagcagccatactttgaccactcacaggtggccaactgttcaaaccatgtgcaaataaggcaaacactgaggtgtaacgaccacggctgtttctggacctcacttccttttctgtgtgtcactttccttttcctgtctgtaggtcatctccaagtgtgcagcagctgacattgttctgaacctattctggttgcaggaggggtggaaggaggctgccagaattgtgaattgttctttgctcagttaaactctgttaaatgtaatgagtgttaagtaaacagattctatggtggaactgccaaggaattcagaagcaagttctggcttccaaagcgtattagtttcttgttgctgcactaacgaagtaccaaaaacttagtggcttaaatcaacaccgatgtattgtcttacagttgtggaggtcaaaagtcctaaaatcaaggagttggcagagttatgtttcttttagaggctccagggaagaatccatttccttcctttctttatcatctggagactgcccgcatgccttggtttatggcctccatccaacaatttcctcactctgacctctgtttcctctgcttccatcatcatacatatcatatctccttctccgactctgtcctgtcccgcttaccccaacacacttgaaggatgcctgtgattccactgggcccacccagataatccaggataatctccccatctcaacaccattaacttaataacatctgcaaagttctttctgccacgtaaggtaacacattcacaggttctgggaatttggacatgcacattggagagggggcagtattctgcatgtcatacaaaggaagaaagctttcaatactgaactctattgttctttatccacgtaataaactaatactgaacttcttttattcctgtcacatttgtaaaagattgagggacaaatctaaagggctatataaatgttatcattgacaatgccagaatccatacaatgagctaatggagaaaaccaagctttatttggcaatattatgttgaatttctgattcattgtacgttaaagaaaataactccaatgtttgtatttattaaaatggttctgcattatgcatataaaattggaccacaatgcacgttctgtttttaaccctcttttcattattctctcatgaaatatttccttatgttaggattcatttactaaatttcacaaaaccataaattatgcaatttctctaatattattggagatgtcatttgttttttatttgaatgtttaaatttcataaacaattttatgttgaacattctaaccaataaatccatgcatgtccataatcatttctgtaacataaaatgactatgacaaagaattatttaatatttttaaaatacttacatccataattgatgatatcagccccctaaaatcacatatagctaacaaggtaaatataacaacatttgggctgttccattcattttcaaagaattttttctataacttcattgggggatagaaagctcagagtcaagaacataaattatagaatagaacatctatttttttatttacagagttggtaagtaaacacatttaagatctaggtctttaaacactctttatttaaaatgtgtggcatgtaattccatatctacaaagagcaacttacctttgccatgggcagagacagctcacagtagtgaatgtgtgtaatcagaaataaaaagatggataacttcaagaaagtagcgggaaaactagcaaaatgcttaggcaagacccatgccaaattaaattttgttgaagggcaatacctgcaggatgatttttcaaagacacaaaaattaaagttgatgctcaccagtgtaatcgaatcatcaaacgttcccactgccctgctgacttacataccagtgagaaaaactaatagtattatttgatgtaaagtgtattaacgttgaatgctgagatcatagaaattaattggaggacttttattttaaaattataggatgcaaataataacagcaaacattaaatgttggcctaggtctgaatattactgaagtcaatcgtcttattatgctcattactcttccaaagagtaaaaaagtgcatagaagagaagattttaaaattaagtaaatgattaaatcacttttgagaacattaaagatgacatgctcatgatataaaattaggagagttaagccaatatctgtatttgtatgtaaaatcaatataatgtaaaatcaatttttacatcaaagtgaaataaattttgcaaaagataagtacgtgtgtgtacatattcatataatcttatatatagcagtggtcttgaaatggtagagtcataaatgatttaagtttatttttagtatcttcttttgtgtaataaagatgatagtatatttcctagtaatcaacaaaaattcataactgttttaaaaacagaagtaaaggtgacctattgaaagctttattggacctttacaaatagggtacactaagcaaagtgatcgtttttcgctattaatattacaggtatggtggtagacacaaatacgttctgtgctcaatttgtaagactagcaaaatgtataatatctaaggaaaattgtaaaatatatccattatactttatctttttttgaaaaatatagcaacgatttaagtagagggatgaaacattataatgacacactacagtcgtattacaaagttcagacaaggcttttgggtctgctatcaaagttttaacttatcagctattttacaagaatcaatatacctcaggatctggttctcttgacttcaaacattatatgatcacaatgactaagagcaatcccattactgggtatatacccaaaggattataaatcatgctactataaagacacatgcacatgtatgtttactgcggcactattcacaatagcaaagacttggaaccaacccaaatgtccatcaatgttagactggattaagaaaatgtggcacatatacaccatggaatactatgcagccataaaaaaggatgagttcatgtcctttgcagggacgtggatgaagctggaaaccatcattctcagcaaactatcacaaggacagaaaaccaaacactgcatgttctcactcataggtgggaattgaacaatgagaactcttggacacagggtggggaacatcacatactggggtctgtaatggcatgaggggatgggggagggatagcattaggagaaatactgaatgtaaatgaagagttgatgggtgcagcaaaccagcatggcacatgtatacctatgtaacaaacctgcacgttgtacacatgtaccctagaacttaaagtataataataataataaaaagaacaccttagttttaatcaaatcataaagactatgggtctagcaaatgcctggtgcaactagaaaaggcagcataaattgaagtcccagactttccttgagacataggctgcttttgaacactatgttgatctcagcttgggaactgaaaatcacttgtaaggaattcaattcaatttctttaatctttgaactcatgaaattaatgcaggtgaggttatttgttttcagtgagccatttaatataacgaaggagggtttttgtaatccctaattaatttttgccctcaacccaccaattgattaataacccaggggagtgaacagtcagccacctgcccctcccaaataagtgctactgccattaggaatgtcacattcaaaatcaccgttgttaaaataataacaaatttgagtaaaaggtgatggcattaatgagtcaaacgaatttcaattcttactgattaattggtaaaatttatatcatcataagccctgcaaatctaccttaaataaatgtagaaatggagaaatgagctatggtttttattgagactacgtctactatccaaacaaatgttttttttggggggatggggggtgagcataatataatatagaactgtgcaagatgactggctgctatatttaactcagataaacacataacaaatcattattctgtagtgagaaggcacacctcataggctcctttttcttttttttttctgtcttttttttctttcctcggggcctggatataagaccacagccatctaaataatcctccagaaataaaccaatgaaattgtgagtctgacaacagacacagtattatacctgcagctggtaaatgtttccatagtccaaccacctttccagtaaaaattttgtccccgggggaaagtcagcagcagctaagattttaactacttttctgcaacagaaaagtttggagcaattgagcctttataaattttaatatttatgacttttatttttcttagggaattacccacccatcaagtatattgtgaaaatactactactgtattactaaattcccataaataaattcttttgaaaaatctggatgattaactatgaggctgcctcgtaagaaaataaataattccaaaatcattttgttattttccataatttgctatgttcataattagtgaatgtgtatttcaattaaaggaatattagaggctagaaaatttgtaaaagttaggccagttacctggagtgtgaacctccactgattggcctgctctgttttgatagcacccctaaatgttggaatgtttgacttttgcatcctacctgttctctcctctgtagaaaaagtatttacttctatacaatctttcagcccatgaacatatttccaatagatactacgctactacgggggatataacatagtgaacttagtctttgctatcaaggaatctaaaatgaaattgaaaagaaagggcaaaacatgaaatagcaagccacccagagttttggtgagaatatgaacagttacaactgttaaaatttgcattatttgtcaaaatatgaaattcatgaatgcttttacctaacatgctagtcccgtgaatctaatgcatatgcatgtgtgtgtgacaaagatatgtgtgtgtttgtggggaggtatgtataggtgtgtacacacacacacatatatacatatatatatgtgtatatatataaaatgatgtccaccaacacattatctgtaatagtaacaaatagcaatatgtgaaaggagtagtcaaaggaaaataaattgtaatcttttcttatcctgagttctctcaagaaacacagcctgaggggctgcattgcttgcaggtttattttgggaattgattgcaattgatgagagtagaagcatgagaatagtgtgacagaaaaagagtgactgccaatcctgacacatgatattgatcttgccatttccagggcaattgtatatcaatcttgcttggggaccttctgaaaaaatgagtagactttcctttgacagtgtttcttaagggctggaatctgatcttttgtgcctccaatactcatgagttgctctatggaacttgtttcctttcaccttcaagattctcatctgtaagaatctctgagcagttgccacaggcttcccagatggtgcccaagaaacagaaggacagaaaggagaaggcaggcagttctactgagatgaggggctgccagagtccaccgagaccatcacaaaagtggagtgagctttgttacagctgcatcccagaaatgctttatgttcattttaattttcactgaactaaatattcacttgtcatttgattttgacccatcagtttttcagatgcaatgttactcaacttccaaacattaaagatttcccagatatctttctgttactgatttttagctcaattccattttggatagaaaacatactttgcgtagtttcaacagttttaaattgttgagtttgtttaatggcaaaaaacatgacctatcatggtgaattctccatgtgtgcttgaatgtgttctgtgttgttgggcagtgttcgctatcagttaggctaaattgggtgacagtctgattcaggtcttctattatttcataggttatctgtctactttattattaaatactgagagagaaatgtttaagtttccaatcataattgtggatttgtctctttctcctgctctatccatttttgttcaatgtattttgatgtcctgttttaaggtgcatacatatttaaattatatctttggtgaactaaccttgttatcattttgtaatgtccctcattatttctggtaatattccttttatccagtctaatttatctgatatgaatatagtaattccaccttttttgttttttgtttatgatgtggttccttttactttagtcactctaaggttttacatttctaatgttttttttgtagacaatatatagttggatcttgccttttgtttatgtaatttcatcatgtctatattttcattcattcttttaaaataattattggttattatctctttaaattttccctcttctctctcttctgaaggaacttcaattacacgtaggttgggccatttgatattgtcccacagctcttaaatgatctgtgtagtttttcccattctttttacttcctgtttctttttgtgttatttctatttatctatcttcagattcatgtattctttcccgggatgtatcaagtttactagtgaatatgcctaaagaattcgtcctctcttatattgttatttttggtttgtttttcattttggcttcttcaatgtattctttcttaaagcttgcctctctctgctgaaattcccatctgttcatgcatttgtgtctagctttttataatatagcagcataattatattaatcatacatattttaaaatatttctctggctgttcaaccgtctgtgtcaattttcattctggttctgctgattgttttatcttttacaatgcgttttctaaagtgagtgtgtgtgtgtgtgtgtgtatgtgtatgtctcataatttttaattaattgtaacacaataggcatagaacggtagaacataatagtatatattgtgtggtttacacagtatttaaacgtggaaatgcatgctccttgtttacttgcttatcgggctatacttattaaggagaggaaagtaggagtcaatttaataaggagtatggctaagtttgagttttaatgttattgtggttgccttatttcagagttttagaaccttggtgtcactgacatttttgtctggagaattctttctttgttggtgatggtggtggcagtggtcatggtagtcctgtgtactatagaaggttctgcagtatccctggcctctatccactcaatgccggtagcactttcccattcccaggtgtgccaattaaaaggatctccaaatattgtcaaaatttccctgtgagtcaaattgccctcatttgaaaaccaaaagcttcaaatcctctaaaaatgccctgtttttgtaatagtatgtttagagggattttcctcaatgttcatgccccacccaaggctgtcagctggtctggtgtatgtgagtcacaatcttgtctctcctccaacactacttgacatttctagtgttaggggcagaggcacttgctctgttttcttggtcttagttagactctgtgaactcaggcaccaggaatgagtccttcccaggaaccctctttttctcttcatggctcctaaattctgccttatgtctatggagggtttttgtgggaaatcatttcctgaccctgctccagcagtctcagaattctgaaggtatttgtataagatcctgggttataaaatgtttccttcttgtcctatcccccactcttaaggtggaggagagtttttcttttatctttcctcccctcccactcccccaaaaaggaaacaacacaaaaatgagttctacatgtgctttggaagtgggagtatgacaagatttactatacttcccccaatggctgaaggaaaggtgctaattaagagagaagttttataatgtgatacatatacaccatggaatactatgtggccataaaaaggaacgagattatgtccctcatagggacgtggatggatctggaagccattaaccttggcaaactaacacaggaacagaaaaccaagaaccacatgttctcacttataagtgggagctgaacaatgagaacacatggacacagggagggaaacaacacacactggggcctgttgcggggagcgagggtagggagagcatcaggataaatagctaatgcatatggggcttaatacctaggtgatgggttgataggtacagcaaaccaccatgactctgacaaaagaaagaaaggaaggaaaggaaggaaggaaggacagacggacggacggaaggaaggaaggagggagggagggagggaagaaaattcatgattttgatttttattatctttaatatttttattgttaaaatgagtatgacactttccagtcttctatgtcctaggcagaaacagaaatcaaatattgctcttggtgtacgaccttggcaagcagcagtaagtgtagttctagaaacttacataaggtctccccaacaggccaaggcaccgaggtgtagatttggccaactcttaaatatgtaaatggtaattgcattatgcagaagttaaacatctctttagctgattttgcaattagtgttaaattagtgattagttaagaatagcctttcattgttcttctccagtgcattgatggtgcacagaaataaccactggattgtatttttcttgtaaatattacttcccccaacttctcaattgtttgagatgctgccccaattagtgctttcccttccattaatattccatcaagtattctttaagcccttgggtagtggtgctggcagaggtattacgggcagagaaggaaagccaacatccagccaattctggtaaaaatggatcacagcctcacagcagtgtagaaggagtctaatataatcaatcttccaccaaatagctggctggtctcttctagagcatagtatcatcaagagttcttcataggcctctgctgcctataatttgggcattccatgatgaagtcttctccattaggtttaattaaagggagcccatgctgtttggcttaggactagtcccgtatggccatcttgttcatggtcctactgaacaagcagaggagtggccatggagccatatgcctggccttatactccagctggataatcgggtactttcctattgagtcctacaaatgcaacaattgaaacaggcagattgttgctgacagcacgtatttcccccctccgtcttcattcagggttcacctatagcctctttcaggtgtgattttttgccctctgaaagctgacttattgggaaggatgctcttctaaagtgtctaggcccacacttctgtgctaattactcatctggaacccagatttatgcttcaggcaaccatcagaagggggtgctatgaaattctataaatgactctgtgagaatcatgttgatataaatttgctgacaatcttgatttctgatctataggtttccttactctcccaacctagagtatatttgagttcatttgcaaagatagtttgctcagattcttattataagaaatgattttttctgcatagattcttagatattgtctcttatctaaacataactaaataaaattaatctatgaaaacaggttaataagaaaacatattaagtaagagaaaaaaatatatatacatagtacatgtaccaactgctttgtctaggccctgatccattacagaaaatataaaaagaacttaggacaactaagtgtattggtaaattttaagaaaatctcattctgctatcaaaaatgtaacacaacatattatactcatatgatcatgtagtttataaaacactaaaaagtattatgctttagtaattttctttcaaaaaggatatgaaattaaaggataacatataatatctcatgaactatatctctaaaacatgtcaattgatgatttcttatcaaataaaatctttgaccagttgactgctttaccctcacaagtgaattttttctaggtgacaaacgcccagcaaattgattatagagaaatgcatgcttattatgataactcagtaattaaaatatgccctcgatgcttaaagacaaagctattaactatcactcttctccacttcacccacacagtgtttaaaatcacaggatcatggaataactaacaaaatcattttaagggtctagaaccatccatcctaataagcattaatttactactgaagatactttgttgaagcagtaagaatatttgccaaaaaaatattttaagctttctgttgtcattgttaacatttatttcatttttgtcatgtggtcacagtttccttttgacacgtcttagataagagctatccacttgcctataaatgttgacatggcataagtgagaggtaagtgaagacttttcagactgcttctgtgaggttgaagccattagtgagagtgtataaaatgttcaaaatattgccctagaggtttatattttttacatgctttcattataactatttcaatgttttaaataaataaatatcaccagtctgatcactattgttttatggtaaactaaaaacatacctattgtgaacacacttaatttgttatatataggcagcaaaacaagtataaatgaaagatggctttcattatcttaatcctcaccttttgcagcttcaaatacattttagaaaaaaaagtaaagtaagaataaataaataataaagtaattttcctttgggttttgggaaaagatggactttcgttaaattcacattttgcactttctcaagtttcttcttatgtctgtttacatatttgtgtgatggctgactagggcttagaggtaacatatttaactatggaaaatttttctctgcacatccatatggcctagttaatacagttattgagttaaatttgcacacttactctaggaaaatcaagtctttttctaagaattccttttgcaggcatgtttctgtgtcctgtagacacagaaaaatataatttggagctggtgcaagcctactgaataacttcatatgggacctgtcataccttggaaactttgcactctgagccatgtaggtgcgtgcatggcctctgagctaagtcgacaataacctaggagctcttctaccccactgaggttatattttgcaactgcttctgtattctctttgaaccccatgctatgtgtatttgtctgttttcacactgctataaagaaacacctaggactgggtcatttataaagaaaagaggtttacttgactcacacttttgaatgtctggggagacttggggaaacttacaatcatggtggaaggggaagcaggcacatcttacatggaggcaggtgagagagaagtgcaagcagtgaaatgacaaatgcttttaaaactattagctctcgtgagaactcactcactatcatgagaacagcatggaggacaccagccctaagatacaatcagctcccgccaagtctctcccttgacacaggaagagaatgggaattaaaataagagatgagatttgagtgggacacagagccaaactgtatcatcatcaaatgctcaactaaaagccttcagcctgctggtgttggttgtctcaaagactattgtcaccaacattgtcaataggaatgccagaaacccacagacaatgctgctgttgttgatgaccttgcccagacttcatagttcgtagcctaagccctggaagtcccagagagatatgacctggtctggtcaagatccctacatttctcatgatcacttaaaactccccactaagagtaagccaggcattggaaccatgagaagtaagagtgtgtgagaaaactccctttgcccactaggtggctttaccacaggaaactacctttcaccaagtggtgtgctgcattatgatgtatctctttccgtagtcacatacacacagtcatattccttgaggagcagtgattagaaggacagggtgcatgtgcaacagctgattgtcttgggttgggcacttcacccaagcttggccaatgacattctttctttggcagtattttggaatgaaacaaaaattatcagggaagcttcctccagttaagaaggttcccaaacgatgaggtgttgtattagtccagagactcagttctccagagaaatagatctgttctaaccaataggagatacacacataaaatacatataaaatgaggatttggcttatgtggttatgaggctgctacattccgaggtctgcagttgacaagctagaggcccgggagagctgatagtgtagctccagtttgaatctgtgtccaaagcaaaagaagaccaatctgttccaactcaaagacagtaaagagagagagaaaattctccttggttcaaccttttggttctagtcaagcttgattagattggatgaggtccactcacattgggtaggacaatctgctgtattcagtctactggttcaaatgttaatcgcatctagaaagacccttagagacgcatccagaataatgtttaactaaatatctggactcctgtgacccagtcaagctgacacaaattaaccatcacaagtatcaacagttgaggtattatccgtgataatttacttcatgaagagaaaggtattctgttgtgagatgacaggatgacgctgccacacttcatagagaaaagcagaaaaccatggaagagaaaattccctggaggcatgcacaccttgttgctagatgtttcagggacacacctgttttcttacttttcccagggctgggttgacttaagaaatattatagggacctgtaattaaattcccatattttctttagtttcaattcaaacttggtttcaacgattagacactaaagctataagctaatacatgtgactaagtttgattaaaagatgactcaatgaggagacaagcaggctgggttctatcctgtgtgtgctacagattgtctgagctcagagaagtcacttacccttttaaaacttcaagtatctcatctattactcactatcaaacaaatacatattgaacacatattctgtgccagacactgtggtaacaccaggtttgcagtgagaaaaaaacaaacacgatcataatttataaaaggtgcagctagaatttgaccccaggactctctgcctctaatgcttctcaacactctaatacatttaaagccccatatttttccactatatccagctttttatatacagcaaaataatgtattcccccaaataatacaatatgtattcaaacataagtagatatctcagtaccatatatataaacaaatataaattatgtatacccacatgccatttaaaatatgtttcatgttaaaattacatttgggggtcatgttgtgaaaataaaataactgttgatttatgagtcttcataagaggccgattcttccttataataaaagttatttatgtcgttcctgttaagacgagaaagtttcaccatgcgggagaaagccattgatttccttttggggatcttaaaagttattttctacttcctaaggtagaaaggagacctctatgtactctgttttatgcatcccatgcttatcttcccttcaaaacccattcaatccccccatgatctgtgcccatgaatctctccttggcctcttccactgcgtgatattgcactgctctaaactaatggaattgatttccctttcaacagtggggtgggggaacaccggatggaagcagatagcaacactcccagaacagggaaactggtttgaaaagcttgagggtgaaattgctgcagggccagaaatagagagcagccttctgaaaaagagaaggtcacagatccaaacaaagaatgtttataatctgtatgattgccaggttttttggataacagtgacccagcagattgcttatgctgagtcacttatgctattcctgggaagagaatagatttttttttcttttcttttttaaaattttcctttcttttacttttttttttttttttttttttttttgacacagggtctggctctgttgcccagcctgaagtgcagtggctcaattatggctcactgcagcctcgacctcctgggctgaaacgatcctcctgcctcagcctcccaagtagctgggaccacaggcatgagccaccacacccagctaattttttaatcttttgtggagacagggtcttactatgttgcctaggcctgtctcaaactcctgggctcaagcaatcctcccacctcagcctcccaaaacattaggcttatagacgtgagccatcacacctggctaagaacagatttgaatgttgtcagaatgaagtaaacagatagatatatgactactttatttgagcaggtgaagttccagtgtgtggaatcctaactttcccactgattccttttttgttattattatttttcattagcataaaatttgttttgatgaattttctcatggtgtatgtatcataaatgtgtagagtattagttaattttgattaatcaacttcaaagctctcagtgtcttacaccaaccatatttttcttggcttatggcagctgccgctcattttcttactcatgggtgaccaactatggctcctcggacttgactggaaggagctgggcttcactacgtagtaaagttgggttcaagttgacaccacaggtttctacattctccttgggccagtagcatccttttttcttcctggtggatctgagaagcacaagtaggcaaacaaaataccaaaaatatgcttaaagcctctgtgtgtgtctaatgtcccctaccattccactggctaaagaaagttacatgggtgtacatccaagtcctgcagcagtgtcaggaacatttctctgtacatgagcggggggtctacagttatatgagaatgtagttgttacaaaggagtgaataactgacactaataatccaatccatctcacaaaattgacaataaacagtaccaaatgtttctaagaaaaataccattctttctgaacacctaatcctgcttctgggagacaaatcttttctatttcttttactgtttaccttcatctatttatctatgtttatgtgtgtgtgtatatatatttacatatagttacgtatatatgtaaatatatatatatatatttcgaggtggagttttgctctgtcacccaaattggagtgcagtggcgtgatcttagctcactgcaacctccgcctccagggttcaagcaattctcctgcctcagcctcctgagtagcttggattataggcgcctgccactgcgcctggctaatttttgtaactttagtacagatggggtctcgccatgttgtccaggctggtctcgaactcctgacctcgtcatccacctgcctcagcctcccaaagtgcatggattacatgcgtaagccaccacacccggtctgtttatatttttaaatatatttaggaaatggtaatgtgcttatattttgtataaatttgtattcatacatattcatcaatttcagatgttatctgtcaaattcctgtaataggagacaagggtttaactttgttgtttactcatatgttcccttctcccactgtatcaatataatattatcacaatttggggatttaatctgttatcagtgtttatgttataattcactgcttacatgctacttttcaaatttcctcacttattgattttatatttgcttaaatatctttatacctttgttctaaaaattccatcaagctcctgtcactaagtttttctaatattgaaagcacagatactagcatgctgttaatttcacccccatcccttagtacacactgagttttgcctcctcttttgcactagctgccgcggactcctggtgcaaaattattctccttgaactttcttctgtgcttgagatactctactagtactcaatattctactagtattcaaagtttccactgagaagtctaatttcaaattcttagtaggtgatctgttttattcctcctccgtacgtttttagtatatccattttattttttgaatgtctgaattaccaaacagtgcatcttattgatgattgcttttttaattagtggcttttccaaactgaagactcattttcaggtttgggaaattgtctatcattattatcattattattatttattttatcccctctctgaacctcctagagttattcctattttcattattttttcctcttatttttcatccattgtatatttgttgtgatttccagaagatgttttctcttactgattgttctgatcgtagttaccatcatctcttgactcgattaataaaatagcctttgaactcattttcctgaatttacctttgcttcattggtgtccaggcacaaaacaccaaacatagagacccttttaaatatgatgtcggcccaaatgttctctccttcagacgcggtaatggtttggatgtacagttcactcagaatgaaagctgacatctttgcaacagtcgacaggccacttctccatctggactatggtcagccctccgttgtactctctggcttttcttcctttctctcagactgtcctagacacatcagtgactttgctacttttctacatagtgctggtcttatgaaaatcaaacatgggtcacacgtgaaagccacatgtgtgattttacatttttagtagccagttttttgttttttatttaagaaaaaaaagacattttaggctgggcggtggctcatgtctgtaatcccagcactttgggaggccgaagtggacggatcacttgaggtcaggagttggagattagccagaccaagatgatgaaacaccatctctactaaaaatacaaaaaattagctgggcgtggtgttgcctgcctgtaatcccagctcctccggaggctgaggtgggagaatcgcttgaacctgggaggcagaggttgctgtgagccaagatcacaccactgcactctagcttgagcgacagaacaagactgtctcaaaaaaacaaaacaaaacaaaacaaaaaacaaacaaaaacatttatttataactagtctctctttttttttttgtctgagacctcactgttaattgaaaaccactgattgctcattagtactaagggtcaagagttttcagtaagtcacagaaacagagagcaaaactgtgtttaccagaggctggcgaagtggtctggggaatggggacatgtgaattcaatggacacatagtatttccgttagatatgaggcatgagttcaagagatcaattgtacatcgtagtgactacagttaatagtaatatatttaatatttgaaaattgctaagagagtatatttaaagtcttctcattaccaaagaaaatgatacatatttgaagtaaggcatatgttaaatagcttgacatagccacatagcctttctaccgtgtgtacatgtaacatagtatcatgctgtataccataaggactatatatgtaatttttccttgtcaattaaaataaatttcttaaaacaatgtttttaaaaagtcagtaatttgaacacagatgtctaaataatgccaggttcaaacttagatttaaacatttaaaatatccaaaggagattctcttactctctctgctttgctttactgtaagagatagaattcatagaattctaagtttactttctctggccaggcacagtggctcacgtctgaaatcccagcactttgggaggccgaggctggctgatcacttgaggtcaggagtttaagaccagcctggccaatgtggtgaaaccccacctctactaaaaatacaaaagttatgcaggtgtggtggcgcatgcctgtagttttggctactcaggaggctgaggcaggagaattgcttgaacccaggaggcagaggttgcagtgagccaaggctgtgccactgactccagcctgggtgacagagagagaatccaacaaaaaaaaaaaaaaaaaaaaaaaagagagagagaaaacaaaatactatctgcatgctgaaactttcccatgaaaactggataaagatatgacgagattaaaggaagacactaaatttctaaatctttcttccgataaaatagtttagacaagattaatttggaaaaaattctggtaaaatccttctaacatgcccaactcagaaagagcgtggtggagacttatggccaaaatagggcttgggattgagatcaagtgctccaaatgagttttcttttgtgtcccagatgagaaacatatttggaagaatctgtgagagaaatatgccaggcagaaagtctgaaagacaatgaactttcttcttgatcaggcagaccctgtcactgatatttcagacagcagcaccaaaaagagtatcagagacagacatactgtgtacagggagtgaaggcaagcaaaacagaacagggaccattgatagctgtccccagtaaggcattttccccaagcaagaagagataaactgccactgttgaaaatgccgacttgtcttacgctttgtgctgctgaagtggcactgaaaatgtatatctattgtatctattcatatgaagttgggttgctctaacaaaaaatccaagctagaatgtcttaaataagatatattaagtaatagtgatagaaagtagagaggagtatatagaatactggaattccagaaaacgagactggaaaatatagaacagaagtaataataaaaatagaataagatataatcctgagtaaaagacccaaatctgaagaatatataggtacgcgatacatcaggcaaaattaatcaaaatagactgatatagacaactgcatctcaaaagaataagaagaagaatccaagagtgtaacaacataaataatgcaaaatttgctactaataataacaaaaaatcaggctcctttcaatgccttctcctcagcattaaacacaagaattcaagatttgaaggaaataagttatttcaaaagatacctattatcaaacaaagtacaattcaaatgtgaatataatggcaagacaggctcctatactttctctgaaagcactaattgaagatatccttcagctaactgcatcacaataaagacttcaaaagtggacagtttctagaaagcattaaaggtggaaagcacaaaaactatttaaactagtcatagaaaaacaagcattataaatgtaattataaaacaaaacacaactaattcttgtaagagcagacacataaaatgttaatcataaacagattctaaattgctgggtcgtatccccaaaactgggcaactgcgatttaaagaataaaaatgtgctacttccctcattttaaataggaataagtagatactactttgtcactgacattggtaaacagaaaagattaagttcaactgtgctgttttcaacaaaataaaaggtgaccatttgtgtaattaaaaatcatattaaatattcaaggcaaacaaattgtaactcatactagaaaagtaaaaagaaaacagccagaaacataagataggaataatgaaacttgatatccaaacagtaaatttattagtgatgacaataaatacaaataggataaaactcctcaataaaagacaaaaactcatataagtaaaaaaatgcaatccagaaacttgcaagaaatgagacaacatgggagtttaaatttttaaaatctcctcttcaaaaataaaatgagatttatggagtaaatatagcaacaatgtgtttgtacagtcaatggtaagtacagtcaattagtacagtcaatgaaacaagttaagggccctcagccaaacataaatagtgtaaagtgcggaatgaattgcacccaattgaaagaattagcaagaagtccacaattggatccctacaagaaagagcagaatagagcaaagtagtaaaggtagagaacaatatcttaaaacgtttgctgctattcctctaaattagtgaggtcatcagtggaggtatttgcagtcatttggaatgttctttgagcctttcttccttgatatagtttggctgtgtccccactcaaatctcatcttgaatttccacatgttgtgggagggagccagtgagaggtgactgaattatggggttggatttttcctgccctgttctcctgatagtgagtgagtctcaggagatctgatgatttcaaatatgggagtttccctgcacaagccctcttctcttgtctgctgccatgtgggacgtgcctttcacctcccaccatgattgtgaggcctccccagccacatggaactgtaagtccaataaacctctttgttttgtaaattgtccagtctcgggtatgcctttactagcagtgtgaaaaaggactaatacattcctcttggtggagaaccatcaacaacataaaagcacattggcgagagtcagaagaagcagtctagtttagccttctcatgctaacctcatcatcctcttgcaaaatagtaattgcaagcagaccaatgtataatgtcctaattctaattctttgacaggaaacaaataactgtgattggaaaaaaacaattgttgagcccctgcaagtgaaatatttaaatccacaagacctccctacctttgaggcaagaaaggcaaagattgatccaaatgggaagagatggtggctggttccacaagagtggacctcagtgcatgatgcataacacagctgaagaccagcaacatgctggcacttcccacatagagcccttgcccatctctttttattttcctttcagtcaactaatatataacatcttaatattcatgcttcaactagtcattctgtcaggaagcatttgatctgtgtctaggttaaaggaattacaaaaaataaacaatacaaatgaaatctaaaatgaggtttggataataaacaggggagaagagttagtgaggtttgagggataaaggaatgtttaagtattatagagttgcagtaagtagaaatttgatgctatagaagaaataacatttattagtgaaattaaacataaatttctcaaacagtttccaagctaggtgttttagtcagggttctctagagggacagaacaaatggaatatatatatattatatatatatttatatacattatatatatttatattatatatttatattatatatattttatatatttatgttatatatattatataatatatttatatataaatatatatttatattatatatatttatattatatatagaatatatatttatataatatatattatatatattatgtaatatattatataaatatgtattatataatatatattatattatatatatttatataatattaatataaatatatatttatattaatacatattatataatataaatataaatatatatttatattaatacatattatataatattaatataaatatatatttatattaatatgtattatataataagataaatatatatttatattatgtattatataataatataaatatatatttatattatataatatatattatataaattatataaaataaatatatattatataatatatatttatatataaatatatattatacaatatttatatatttatatataagatatatatattatatatttacatatttatatataatatataatatatattatatataatatgtatatttatataatatatattatatatatattaatatatattaatatatttacatctatgtatatattaatatatatttatataaatataattatatataattaaatatataactatacatataattatatataattacatatgattatgtatattagtatatatttatatattgatatatatttatataaatatacatatttttatatatttatagattaatatatatttatatatatatatataaaggggagtttatttagtattaattaacatgatcacaaggtcccgcaataggccatctgcaggctgaggagcaaggagagccagtctgagttccaaaactgaagaacttagagtccaatgtttgagggcaggaagcatccagcacaggaaaaagatgtaggctgggaggctaaaccagtctaggcttttcacgtttttctgcctactttatattctggccaaactggcagctgattaggtgttgtccacacagattaagggtgtgtctgtctttcccagcccactgactcaagtgttaatctcctttggcaacacccttacagacacacccaggatgaatactttgaatccttcaatccaattaagttgacaggcagtattaaccatcacaagtccactccttgttaacttgaacccatacacatctcctgagatcatatataatcttcaaatgaagaaaagaatgaggtcataattatgcctaacataatacaactatccttactacatcaggaaaggcaccgatccccaacccaaatattattacataaagttaacaatacttaaatgctgatgtgaagtcaataaattttatgtcatatgataaaggagaaaggaaataaaatgaaggtactttcttatgcggaaatatgtttaccaaaagaaggaggaaatactcatgacaattacagtcctcatttctgcagctggtcatgtggtcataactggtattgatgactaccttcttctaccacccattctgtattccttttgcctccagcaagcaactcagcaggtcgtggatttttttttttttcctgttggtgtgacccaaaccttcattcctgaagggtctggtaatttgtagtcctccctgaattgggctattatagtttcccattgaccttaatcacaggacatggtaatactaagagatgccctaatggatctcctgtattccgggcacactcttcctacctccgttgtggagtagtagatcgatttcatcttgatagtctgggtcagtcaccccagccaacactgtaactcctttcttagcctgttgacttcaaggtaggaggatcccaaagtgtccaggtggcaatcttaaattctagtttaatggaatcattgtcgtgtctcctggtgtcagtgttcctccctctggaactaagacctttaggccagtagaacataatgtcactggaacaggaagcagaaattttgctagtggatcactaggtgagtggtgccacttccaccccttgatttctagacccgtgaatcctggctatgggagaaatagtgccatacattggatgctgagtcagagcatatagggccttctggagaactttgccccaatcctccaaagtattgtcacctagttgggttgtaattgtgacttcaaaaggtcattccaccatctatcaatccagctgcttcaggatgatggagaacatggtaaggccagtgaattccacgagcatgagtccactgctgcacttctttagccataaagtgagtgccttggtcagaggcagtgccgtgtggaataccatgacggtgaataacacattctatgagttcacagacggtagtcttggcagaagcattgtgtgcaggataggcaaactcatatctggagtcagtgtctatttcagtgaggacaaacctctgctctttccatgttggtagaggtccaatataatcaacctgccaccagcagatcaccccgaggaatggtgccatatcgagggctcagtgttggtctctgctgctggcaaattgggcactcagcagtggctatagccaggtcagccttggtgagtggaagtccatgttgctgggcacatgtgtaacctccatccctgccaccatggacacttggttcatgggcccattgggtgatgacaggggtggcttgggaaagaggctgagtggtgtccacaaaacaagtcatcctatctccttgattattaaaatcctcctctgctgaggtcacctgttggtgagcactcacatgggatacaaatatcttcacagtttttgaccactccgagaggtccatccacatacctcttccccaaatttctttgtcaccaattttccaatcatgcttcttccaagtcctgaccgtccagccaagcccattggctacagccatgaatgggtttatagaatcacatctagccatttcttcttccatgcaaagtgtacaaccaggtgcactgctcaaatttctgcccactggggaggtttcccttcaccactgtccttcagggatgtcctagaaaggggctgtggtgctgcagctatccactttcgggtggtgcctgcatattgtgcagaaccatctgtgaaccaggccctagtcttctcttcctctgtcaactgatcatagggagctcctctgaggccatcagtgtaggatgggggagaggaggcagggtggcaagagtggagactatgggcatttgagccacttcctcatgtaacttccttgtgccttcaggacctgcttgagcctgatcacatatataccacttccatttgatgatggaatgctgctgtgcacaacccacttaatggctagatggatcagaaagcactcagttcctgataggcagttcaggtcacatggtgacttgaggacccatagtcaaatgttcagtttccaccaaagccaaataatgggccaagtgctgttccagtagttatctgcagaagatggcagggccttgctctataaagattcactacataaattgtcagtaatgtagtagtgtcctccctaaaggagacccagcctccccttcattaaaggggttctgggtctataaactggctcaagtctggaaattgattgaaggggcgtgattctatgtttttataattcaaattagtcttttgtccatttgacctctaagttttctgtgtatataaattaagtaggagtgcagtaggtttcctatcaatttcacttctaggaacacagtgattcattagccaatgccatagctctgcatgaatcagactattctgattgccgctttgcctctgctgttcattacggtagctatgcccaccttgcctttgacatttgagtgctgccacttggaccctgctaccttggcatccaattattcccattgtttttaaattttgtagttgagtgactgcagttcccactgttagatctgacatacagagaagagcaattacggggctcttcaaagatgtgggtgctgccctcacaaatctatttcgcaagacattggtcaagggtatatcttctggaccttcccagctgggatgagtaggtctaaagtgactaatccactccaccatcccaatctccctaagcctttggatcccttcctctacattaaaccaagggagatcaggcatttccacctcactcacagtgggcgaacttttaatccatatttcagctaaccaaacagataaacttttagaacctttttttaactccccaggctgcaacattaaatgcagagtccttacttagtgggcccaaatcaataaattcagcctgatccaactctatgtttctttcaccatcatcccacacccttaatatctattcccatgcctgttctccagatccctgtttatataaattagaaaactcaagcacttctttttaagtgtagcacacttcctcatgggtcatactctcagtcccatctctatgggcctaccaggactttagtctagttataggtctagaagcaaacaggagtgttgcgggtggctcctgaggagaatcaacattaccttgcctggcaactgcctcatgggaggccatcactgttgcctcagggagcacagggtttatctcctcagataaaggtggaaaggctgatggcagcatgggtcaggaagaggatgttgccactactggggatggggaagctgtctcttctggcaaaaaaagttcatcagagtttacaaactcagtatccccagcttcatcagggtcctcccacacatccccattccaagttgcagggtcccattcttttccaatcagtgccctcactttaacagtagacacctggtgaggctgtgcatgcacctttccttgcaggtcagccacttgcatgataagagcttgtgtctgtttttccacaatttcagctctttctctacaggacatgagactcactcagggcaatcttagcagatttgaggttcagtatctgcttctgaagctaggagatagaatccccgagttcattattttctgtcatcactttgtccactgaacttaggagcaaccaactagcttcattatgttccttggctctccacatatggtcaaaggtattatgtacagagtcactaaactccttgactctcatgagcgatgaatcaggagtgtcaaatgtatttattttgcataactctctaaacagttcatgccaaggactatcagtgttctccatactattagaagtagagtccttagcatttttgggtctaatcatattaagcagccaactccagaaaccccaaaatcagtgaaagaacttcatccttaatattctgttcctctagaaccactcctggtaccaaaatctgtattagctagggttctctagagggacagaactaatggaatatatgtgtgtgtgtgtgtgtgtatatatatatatatatatatatatatatatatatatatatatgagtttattaagtgttaactcacatgatcacaaggtcctacaaaaggtggtctgtaggctgaggagcaaggagagcccatccaagttgcaaaactgaagaacttggagtctcatgttcaagagcaggaagcatccagcacaggagaaagatgtaggctgggaggctaggccagtctgtcttttcacattttttttgcctgcttatattctagctgcactggcagctgattagcttgtgcccacccaggttaagggtgagtctgcctttcccatcccactgactcaaatgttaatcttctttgacaacaccctcacagacatacccaatactttgtatccttcaatctaatcaagttgacactcaatattaaccatcacactaggtatacaaaactttagtatttaataaagatataaatagtatttaataaaaataagccctttcaaaccctttgaaaagggacagtttattcaataaatagtcacaattagtgacttatggaaaaaaattagtttaactcctatttgaaatcatgtatcaagataaatttcacactgttaaaatcataaggtaattttaaaaattagaataaactattggtgaatatttatctggtcttcagagtggtctttccagtttttcctccttttccacaaaagcaaaaggaggaaaataaatcatgatagaaataatttaaaaattttcaattttacatattttttcatgtttcaaaaaataccataaaaataaaaggcaaggtataaactggaaaatatatttcatgaaacagtaaagaaaaatacttaagcataatcttttgtgcaaataaaatttttcactaaaaatggagcatttgaactaaattttgtgaacagttctgggtcctgattatttcccaaacgtgtattttcttaagcacatgtctggaggggcatgggaattttacaaaacacgtctttttaaagtaggcatgcttaattacttcctgatttgcttattaaattttgaccaattacttgaagagagtagcaggatgaacttataaaagtacagattttggagtttgacaaatcatgctggaatcctgctttaagcatttactagttttttcaccatgtgtatgccactcaatttttttgagatttgatttgaaatggtaaagtttggatctttgtcaatatgcaaaaaaaattactttactttcctccttgtatgtcaaaggcttgcagattccgagtttctaaatgatgcatgataaaggcaattgcctaaaccagggttggcagatgactacatgcatatcaaattggtctggccatttttaaataaagttttatggaaacacaatcacaccattttttttaacatgttgtctgtggttgcttttgccctatacaagcaaagtggtatcattgtgaaagagactgtctggcctgcacatcctaaaatattatcatcccctttgcagaaaaagtttgcctactgcaggactgaattatattgctacttagcacttgtgagaaaagaacaatccacctgtcaaatacacttaccaggtgaaaatgagattttaatctagaagtattaaaatgaagattctgtagttagtataattttcatgtgttctgagtcattctagcaaaatgatgctttaaaatatgttttaattatgttttatgcatctgatttttttttctcttctcttttcttctcttcctctattatttctttctttctttatcagcaaatccaatgagtgatctaagcaggaaaactgctgaatgcgagcactgcccccactgcacctccttttgattttactacaatacagaatatagttaagcagatgttcaatgcattacaggccctggctaaggtacaatcaaaatggattgagtgccagaaatcagggaggggagtctggactggctgtctttgctccgattcaatcatgtcttgtgttaatcctgccctagctgaatctgaatttatctacatgtctttggcctggagatcaaactgagagtttatggctactctgtctcttgtgaacttctgagcatttcctcttttcactcaatcaaaaaaagagagagagagagagaaagacagagacaagattaggctgtcctttttgttattaccctatcattttagaaataaagagatgcttgactgggacatcaatttggcaggtttagataatcctgtatatctacttgctcaaataagtaactaaatattataaaaatgtggttttatctaacttttacttataaaatagaggaaccaagataacacatctcagagtgcttcctccttttattcagaccacaggtcttattttcttatcacatagtctcttctgttttaacatgttttttatccttctgtaatgcttatataattcaaatggttacacatagttagcacatctaattttgagtcattgcttggaccagaaaagcctatggactacttcctttctgttttctccttttttcctttaggattcaactggctaataatttcattttcttcttataagtacattcttcattccattttttgaaataagcctgaatcagaatgcttcctctttcttgatacatgtatccagagactaatcattcatgtgccaatgaaacattttgatttatttttttaaattttattattataccttaagttttagggtacatgtgcacaacgtgcaggtttgttacatatgtatacatgtgccatgttggtgtgctgcacccattaactcgtcatttagcattaggtatgtctcctaatgctatccctcccccctcctcccatcccacaacagtccccagtgtgtgatgttccccttcctgtgtccatgtgttctcattgttcaattcccacctatgagtgagaacatgcggtgtttggttttttgtccttgcgatagtttgctgagaatggtggtttccagcttcatccatgtccctacaaaggacatgaactcatcattttttatggctgcatagtattccatggtgtatatgtgccacattttcttaatccagtctatcattgatggacatttgggttggttccaagtttttgctattgtgtatagtgccgcaataaacatatgtgtgcatgtgtctttatagcagcatgatttataatcctttgggtatatacccagtaatgggatggctgggtcaaatggtatttctagttctagatccctgaggaatcgccacactgacttccacaatggttgaactagtttacagtcccaccaacagtgtaaaagtgttcctatttctccacatcctctccagcacctgttgtttcctgacattttaatgatcaccattctaactggtgtgagatggtatcttattgttgttttgatttgtatttctctgatggccagtgatgatgagcattttttcatgtgtttttttggctgcataaatgtcttcttttgagaagtgtctgttcctatccttcgcccactttttgatggggttgtttgttttttccttgtaaatttgtttgagctcattatagattctggatattagccctttgtcagatgagagggttgcaaaaattttctcccattctgtaggttgcctgttcactctgatggtagtttcttttgctgtgcagaagctctttagtttaattagattgcatttgtcaattttggcttttgtcgccattgcttttggtgttttagacgtgaagtccttgcccatgcctatgtcctgaatggtattgcctaggttttcttctagggtttttatggttttaggtctaacatgtaagtgtttaatccatcttgaattaatttttgtataaggtgtaaggaagggatccagtttcagctttctacatatggctagccagttttcccagcaccatttattaaatagggaatcctttccccttttcttgtttttgtcaggtttatcaaagatcagatagttgtagatatgtcagatagtagatatgtcagacagttgtagatatgacagataaaactatctgtcaaatatcagatagttgtagatagattatttctgagggctctgttctgttccattggtctatatctctgttttggtaccagtaccatgctgttttggttactgtagccttgtagtatagtttgaagtcaggtagcatgatgcctccagctttgttcttttggcttaggattgacttggcaatgcaggctcttttttggttccatatgaactttaaagtagttttttccaattctgtgaagaaagtcattggtagcttgatggggatggcattgaatctataaattaccttgggcagtatggccattttcatgatattgattcttcctacccatgagcatggaatgttcttccatttctttgtatcctctttcatttccttgagcagtggtttgtagttctccttgaagaggtccttcacatcccttgtaagttggattcctaggtgttttattctctttgaagcaattgtaaatgggagttcactcatgatttggctctctgtttgtccgttattggtatataagaatgcttgtgatttttgcacattaattttttatcctgagactttgctgaagttgcttatcagcttaaggagattttgggctgaaacaatggagtgttccagatatacagtcatgtcatctgcaaacagggacaatttgacttcctcttttcctaattgaataccctttatttccttctccggcctgattgccctggccagaacttccaacactatgttgaataggagtggtgagagagggcatccctgtcttgtgccagttttcaaagggaatgcttccagtttttgcccattcagtatgatattggctttgggtttgtcatagatagctcttattattttgagatacgtcccatcaatacctaatttattgagagtttttagcatgaagcgttgttgaattttgtcaaaggccttttctgcatctattgagataatcatgtggtttttgtctttggttctgtttatatgctggattacgtttattgattttcatatgttgaaccagccttgcatcccagggatgaagcccacttgatcatggtggataagctttttgatgtgctgctggatttgttttgccggtattttattgaggatttttgcatcaatgttcatcaaggatattggtctaaaattctcttttttttgctgttgtgtctctgccaggctttggtactaatcattcatgtgccaatgaaacattttgatttatttttaaaaattatttgtattaattactttttcagccatcatgatatattacttaaagaatacgaacattttagtataaaattcaattcattcttattgagaaacatagtgggaaatctcaattttaagttaaaaattctttgggctgaacttcttttagatagctcattccctatgtgcaatggaaaatttctgaatgaaatttaaatattaactgtctggaatattctagagcatgtagatttttagtttcttacattttctctgagaatgaaatgaagcgattaccttgggcactgaaggggaaaaggttagaaagaaaatggcagagcctgtaccactgggtttgggcaatattccccagttgatggtatgaatgatttctattcaggtaagatagtgctctaatttgaggagtttgtacattatgttgtcctccaccaattgttcttaactaaaaggattatcaagggaataagtcacaaatcatatttaggtccattaaaacaatgaagaggaacccggaaaggagaggcattttttttatattgcacttaaaattcatacttgagccttacttacatttctgccttatctgtcattgctgcaatttgagaaagtcacttacttgccacctcagaatatgctttgtgcatttctgtttgtggcaaaatttcggccattctgtaaactttgccagaaagctacctgtctcatccatttcttagtattggaagcaacccatatgctttattttctgaatctcttacattaggtttatcaagaacaacacaccatgaggaggagctagtgtatgccaggcaccatgttaagtgctaaggagacaattgcaaacaagccatagaaaatccctggtctaacagtagtcactggctgttgtgggggaaacgctataggctatgagaccattgagcagagttcccagctgaagaaatagcatcttagctgattcctaaagcatgtgtggactatagatgtttcctagaagaaggggtggaaaagaaaatgtattctagaacagagaactgcttatacagaacttcatagagaaggtcatcatgttgaaaatgtgaatatttagaagtcatagggcaggtgaagatgtagaatgtgatacaatgaagatgaactgggctggaaggccaagagaatgagtcaggtttaggaatgagtgttgactcagttgagtaagagatccatcacatttttatctggctatttgggcagtcatgttctctctaaaaccaaacactaaaaattgaagctttcaaccagaccctgtcagaagttttctctaaatcaaatagcaaagaataatgaatatctacaagtaattgtctaagtccatgacaatgcattttagttaagattgggattttatatatgcattcatgtgacagctctgtgattttaaggtggctctggctagaggacttttgttaaaataaaatccttaagtacacttgacacagagaaaccccatatctgtttgtcaaacactctaattttgtggtgcaaaagtaaaatatctaaatggtcagcctgctgatctgttgataatttgacatccttgaagtcaggttttaagatcatattgtcaagagcaagtggtatcatctgaagacatcaaaacacagaaggcatcagacaatgggagttatttgatatattccttctttcatttttgttttttgttcaggttgatgaaaaaatgtaaatgtgaatttagatatcaggatgttagcacaacccgacaaagaaagagtagttttctttgaaacttggcaggctcggaatgactgcttctgacatcatgggtatatttaatgaaatattaatgactctgactttaataggaatttcagcacaacctaaattaagctattggaaaagggatatggtcccgttaagaacagtaaaaccgtaagcccccttcctgaagagtagctgtgggcagttaaagtgacaatcaatttaaccaggccatattgctttgtaagtctctgaagtgtgaagtcccagcatgccttatgtatttcattttaatttccttttggacagagctatggttagtggggaacctcacacacaaaaagaaaaaaaaataaatgtgcagaagagaaggaaattatttaaccctttcaaaatactatgccatatagttagctaagtaaagaaaataaggaagattaaatttcttttgttttcaaagaaaaataaatgggcagcacatgtagtaaataatgatgacagatcatattgataatttctatttaaaaacctaaaatgctcccttgacatgtattttgaggtttttttttttttggttaagaaactaggtggtttagaaataaatcttcctttgctatttctacatagaaagataaaaatcatgcaatttcctatgatttttcatctctcattggaattagatatctaaatggccagtttgctgatctgttgataattttacatactagaagtcaggtttcaagatatagtttttcaagtcagattaggttagatgtttttaagatgatgtctttgtcaacttttccaaaatttggatacataaaatgcaaaaggaatatgagagactattcttaaattataaaagaatgttcggttacctgcagcagtttctatgagattgtttttgtcccagagcagccaggagagaagacagcaattgtgtggtaaaataagacataattggaattgagagtccagattgctaaattagacttttttttttagctttgtcactaatttgtaatttgacgtctttgacgtcattctatcttccttggtttcattccttgttctctaaataaaatattaggtttacatagaacacgaagcatccttagaaatttttatatgttcaactaccacttttaatttaaataaaatgttagctgttcaaaaagcaaatattgctatatgcgtgatgttttaccttaatacgagttgaaaggtggctatttatattaaagttatccacgggaagagttttccttcaagattatttcagtacaagctatgtaaggaacaccgttttgtgtctttgaataaagagtggaaagtgccagccacatccttttaataagattagtgtatattggctgataatttcataaaaattttgtcaaattagtgttcctgaagcatagttctgataatattacccacactgtccaagattacctagtggttcccaggaatgctcagagtcaagatcaaattcttttcttagactgcccttcaaaggtttctaaaacttagtcttaacctcaatctgtgttctcaatatttttcccaagacttccaaactctactccttcttctattcttgctcatgttgttcacgctctctgatattctccttccctattggtagatgtcaaaacttttactcaactttcaagatttgaagtaaatgtcatccgttgagtcaatccatcgattgcatataatttcttcattctggattcccacagcagctgaatttcgtggttataaagacttagatttaaaccttggccttactaatttcacatgagtgacctcacttattctcctgaattgtgagtttatgtgaaaggtaacaagagtatctttcatgaagagtttggagatgtgaggattaaatgatgacacaaatgagatgtcttgtatcctacacctagcaggcatagaatttcttctgtttcttctggtgtcttctattatttattgctttgtgattaacaaattgcacagtgaacatgtgttagctttttggtattggcataaggcattgtcttctccattttacagaatcaggaagtacgagagcctcccttgttttaaccactctcctagagaaacatatgtgcacatgacctctaggctcaaaaatgtagatgcttatgtccaggatttgaatcttgaacaggtatgacagagatggagagaggttaaaattcatatgcagaagcagcagtagcagggtcccagagcctcagaatcctggtcagaatgtgactcctaaaagatagttgaatggcttcctgcttcttggatgtctgaagtagcctgggttgctttctaagcctggttttctaactttccatcaattatttcaacctccaatctcctacttgtttcatcattgctcaggaaaaccactgttggttctattcctcacaactgaaagtcctttaactgatataggtttcaaagtccttcagggcgcacaagtgactgatttgacttcctggttttatttttttaattagctagaatactactatataaaaatatgtcaactgtgagctactccaagtatactttatacagaagtgtaaagataaatgtttgatgcttttctttatatactagttttcaaaataatgcatcttttctatagattttttattaaaaattatttatgtgtttttttagtattaagaaatagtttctgaagtatttctattaattgcatttattgtctttattgaagtgcaatcatagtatctgtatacagttttttgttttgttttgtttttgagatggagcttcgctcttgttgcccaggctgatgtgcaatggcacaatctcggcacactgcaacctccgcctcctaggttcaagagattctcctgtctcagcctcccaagtagctgggtttacaggcatgtgccaccatgctcggctaattttgtatttttagtagagacagggtttcaccatgttggtcagactggtcttgaactcctgacctcaggtgatccacctaccttggcctgccctcccaaagtgctgggattataggcgtaagccactgcggctggcctgtatacagtttttaattttgcttcctcacgtaaattctgtatgcattttcctatcactgtagctgttattattccatttgtgctcacataaaatatcattaagtaaaagcactatactgttatttaattacattacctggcttttcaattatcctacgtttgcaaacgaggttggttctcatttatttccaagtaatcttgtaatcaatgccttcatgtgtataacttcttttgcttttaagttgtttccttaggatacattcataggatgtttaccaaatcacaatgattaacattgttatttttaccatatactgtcaaattactttccacagggctataccaatttatactcttcaaataatgtaggaagatactgtataaatgtaactttgcctggttggaatttaccttttaaattggtcactttaataagggtaaaatgtcacatcattattggtgccatttacattttttatataaggagataaaatttgctacgtatgcaattattttttctaaatccattatttgctttattcccagaattttgacattttctcaccaaaatttttagttattttaaatatataatctattttcatcattttttttccgtgtagtgttttcaaagccaatcccaaagcttagaaagctactgatgaatatattggctaaacggtcatttaaatttacttttagtttttcatttttatgtatatatacacacacattatcatttatccttttagaataaccttggataaactaaattacttattttttccacattagtaaaatttagtaaaaatatatgacattatgagaaaaatcccactgagtttcaaataagattgcatctgatacaccacttattattagaaaaactgacaacattatgacatttcatcttcctttccaaagataagttttaaatatctatctttttttttttggtctctcaattacaaaaagtagatcccagaagactaaaaaaaattctaaaggacatactattttcttttttccaccctggacaaaaactctaagcacccttctatcgaaatagacatccagtggccaagagcacagcagatattttgaattgctttggaacatgttaattagaactgctttatctttctccgtaaagcagatttaaatttcccggtataaatctcgataaatcttggtgtctattttatatatccgtttctaagcaacagtgttattgattaatatttgaatacaatttcacattcattatttcattcattttttgcaaccatcctgaagttggcaataaatgttttcatcatttttgtcatatcaagcaggtgagtgaaaagaagcttcagttgagacaggactgaagggcaggagatgaccctggagtcatgcatactccacccttattttaaaactattattctctccccagattattctgaaatgactagattattaccctgcaatgacttccccaagatctttcttctggaactagagctcaggtcttctgactctcagtctggttctcttacctctatgacagaataattctcaagaatacaggaaatctctccattctttccttgtgtttacacattagcaacaccaaattagttaagctcagtctgtgtaatcttgccatttctatccgttctttagcctttgctcaattgtcccctcggccaggatttccctacctatgctgcacttggccaagcctgcctctccacggttgagatgtacatataattttctgtaattaaaagtgtctcatctcctcactatacttttgtctccttcgggcaggaaccatgaccatgttattcattattgaattccaatgcctttgttgaacaaaaatatttgccttccactgcaaagcacattagactaaaatttcattcaggctcctagcacaaggtaggtgccaaaaaaattaattcagatcaggtgctttattttcttagacgatttctcttagctaaccatgtgtctaagcctcccataataataaacacaggaccctaacctataactatcacttccccaactagagtgaaaattgtgggacttgtcttcttttatgtttattttttattttatttttatttttttgagacagagtctcactttgtcgccaggctggagtgcagtggtgtgatctcggctcactacaacctctgcctcctgagttcaaacgattctcctgcctcagcctcccgagtagctgggactacaggagtatgccaccacacccggctaatttttgtatttttagtagagacggtgtttcaccatgttggccagaatgatcttgatctcctgacctcatgatccgcccaccttggcctcccaaagtgctgggattacaggcgtgagccaccgcgcccggcccttttatgttttcaataatcttagcaactagcacagtatagcgcctgatatgtagtaagtgctctctgtccctctctctctctctacacacacacacacacacacacacacacacactctctctctctctctctctctctctctccatatacatgtatatgtatgtgtatatgtatatacagagagagagagatgtatatacaggtaacccttgaataacacgggtttgaactgcatggatccacttctacacagattttcttctgcctctgccacccctaagaccacaagcccaacctctcctcttctttctcatccttctcaacatgaagacaatgaaaacgaagacctttatgatgatccacttccacttaatgaataataaatatattttctctttcttagaatttttttagtaacattttcttttctctagcttacttcattgtaagaatatagtatataacatacaaaatatgtgttaatcaattgtttatattatcagtaaggcttccagttaacagtaggctgctagtagtcaaggttttggagagtcaaaagttatatgcagatttttgactgtgtaggggattggatcctgtaacccccattttgtgtaataatcaattgtgttaatctatatactgacttacatatataaacactgacttgtcacagtgacttagattatatatgtgtatatatgtgtatacatacatatatgtccatgtgtatgcatatgtgtgtacatatgtatacatgtgcatatgtatgcatacacacatatgcatacatatatacatatatgcatacacacataatctaagtcactgtgacaagccatagttttctgacagcttattatattttcaggtatctcgaaaaatatagcaaagtttcaaccaccaagaagcatcctgtcccagcactctgctactagttaaggcctccaatatactgctgtctggagctactgagctgacactcttatttttctagagcacatatctcctcctgtctgtgacctgtctctcggggacattgtggcacatgatagagtacacgtagggagaagcatttagatacttcaatcttcactgcttatcttcatgcttctaggacaataaaaatactttaatttttaatgtacaaaatgattttttctttgaaaggaggtatatgtcaaacaaaccagaataggaatcacgtattttggactttgaccattgtgaaatttaccctcatcctgaaaggaaagacacatataagcatatattagaggatgatgcaaaacactaaaatgaatgtaagcaccctgaggacagcagcttgtgtctgttttattctccactgtatttcagtgatttttaagctgtgcctagcatgtaacgcttaataaatatttgtttaatggtcggagaatatattaggaaaaaggtcttatatgtgtttaatatttttgaaaaaaactccagtacattgtaaagggattactcaattttacattatattgaagttagactaatatatttttgaaaaacatgacataatgaattttaaataaaatgtacaattagaagctaattttcctcagatgctttatgacttaaaaactaattatgaaatgaacaattcttaataataatgaccacacagtctgaggttttgtgttttctttctttgttaaccctaaaccctgttattgaaatggaaagttaaactgacatttctgcaagtttttttttttctttttttatagtctaaaggttaacgagctgtggtgtggtttagtgccgcatgtgctaagctagcacctaatacgttaagttgggtgcgattcaagccttccaagaaaagtgctctcagacattacaggtgggggaggaaagacagaagggaagacgccgatgctattgtgtttgtgttattgctcaagaacggtggtcctggtcagcacacactgctgtttgggactttatatacaagctattctcagggggagcataaatatcccacattccatttcgaaaggtgctgggttataggttattgaccagtttagggatttatagctggagtcagtaattgttaaggaaaaatggcttgacaattttattattgtggaggcctgttggaaaagttaaacacagacttagctgagaacgaacttgatcttaacaataatagatatgtatatgcatatacatttacacacacatataattatgtatactttatatataatagtacatacaaatattttacatataattatgtacaaatactttattacagactgctttcattttcatagagatgttaaatataaattcatttgcttgcttcaacatggataagtgtactaaatactgcttcacaagaatatatagattattataaataactgaaatattgacaaatacattctttccgaacaatcagaaaattgttaacttgtgtcaaatatcagaggaacaaataaaaggaaaacaacacaatagtcatgggagcaagctactctttaataagaggtatcatatcccccgccactttacccatcccctgaaaatacaccagtgcaattgtggatccctataatctgaacaagttaaacacttaagttttttaaaacataaaatgttttaaaattaaaattagagacttaattatcatcctgatgctttctgatgcttaatctcacaattgctcatagattaggaattagttataagagttagtttgatgtttctctagtgatatagaatactgtgatgtcaatattaggtcaacttgattggattgaaggaggcctagatagctgataaagtattgttcctgggtgtatctgtgagggtgttgccagagtggattaacatttgagtcagtggactgggagagggagactcaccttcagtgtgagtgagcaccatccagttggctgccaacagggctagaataaagcaggtacaagaaggcgagataagctggtttgctgagacttctggctttcatctttctcctgtgctgaatgctttctgcccttggacatcagactgcaggttcttcagtctttggacttacaccagtggtttgccagggtctcttggcccttggaccacagacttaaggctgcactgtcagcttcctacttttgaggcttttggactcagactgagccactactggcttctttcttcctcagcttgcagatggcctatcgtgggacttcgtcttgtgatcatgtgagttaattctccttaataaactcccttccatatatacatagatcctattagttctgtccctctagagaacactgactaatacaaataccctaaaaattgtcaaataaaaccttccaaaagcatgtgccacagaaaatatctgggataagttttaagtaagaataaaaatttctgtccatttgaattttgcaaacagctattgagtaaacaactattgagtgcccagtattcatattccagatgaattatggggttatagcttcagcagagaggcctataaaccctttcagatacccatagatgaaaccaataggacagaaaaataggaaagataatgtcttcagggttctaagctaagagagggcactatatttatactggatacatcaagggatgtctgcaatgtttaattctttacctgtaaaggaacaacctggaaaaaatcccagaagaacttcactctggtctctgcttgcccacttcccatctgtattagtctgttttcacactgctgataaagatacccgagactgggaaatttacaaaagaaagaggtttaatggacctacagttccacgtggcctcacagtcatggcagaaggtgaaatgcacatctcacttggtggcagacaagagcagagtcagagccaagccaaaggggttaccccttataaaaccattatatctcatgagacttactcactaccatgagaacagtatgggggaaacagctgccatgatttaattatctcccaccaggtccctcacaccacaatgggaattatgggagttatatttcaagatgagatttgggtgaggacacagcgaaactatatcaccatcctcaccccaacatcagcatctggagctggaagcaggaacaataagtgtagttgtaagtaacagaccttagggaacactgtggttatggaaaaattcaagtagagaggatcagtaatgatttctacctaacaaatacctttgctgaagagagatacatgcctttcattgcaaagtacattatactagaatttaactcaagaaacaggtattgagtgccatctattaatccaggtttgttttgtgaggctacaatggtaaaccccaatagcaagattattgcatgaatgaagcttatattctcattaggaaagaccatcactaaataaatgaaaaatgattatggttgttatgtaatgtcataaatgaaataaagaaaataagatgatgatataatcaaaagtaattagggtggtcaacttaagatgttcagaaagatccttcagaggcagtgactactgggcagagacctgaaggatgagaatgagctaatttggaaagaaacagggaagagcattctaggaagtagtaatagcaaggatgaacttttcatcaagaaaagtttcagtgtgtttaaggaaatggcagaaagacaaaatcgttggaaagtagcaactgaaatggaaagtgggatgagatgttggagatataatcaggagatataatcaggatatattgctgggttttgagaccaggatgaggcctttaaatggtggcaatgagagtctggaaaggtggatgagtcaagtctggttgcactttgtagatgtagtttgtggtgtgtatgttattccaggtttaacggaagtcagtggaaggctttaagcttgtgtgtgatttatggctgctgggtgaagaatgaaggcaaccaaagtgtgatcgtatactccataatattgagttgcggagggtactgttgctatttacacctaggagtggttactagaatatagagaaggcatccacatggaaaaacccacagctgctatggctttcagtggaatgatggaggcaacccaatggtgtgcccaaagggtgatggagtcaaagcaataaatgtactgacttcccctttctctcagtctttaatttcttgctgtcccagactttgcgtgtacccaatcagagggaatctgttgatttccttcataatgtagttccaacaaggcagcctacaagggtatagcctactagccagccacaaacaataaagcagtgtattcctaggctgcacaaacaacagaagtgtatgcaaataatttcccaatttaatgcaatttctatgaaaatctcaagtggttttgtttgaagttttagccatatggaataagtgagactttttgagcagcggagggattgtatggcatgtgaagacaatggcattcccccatgttcttgacaccctgcaggtacatatgcataatgggagaatgggttatatgtgtttgaaatgaaagagttggcctttatgctgtgcagaggccaggcaaggctaatccagggcatctttgactttacccaaaagagagaaataaagtattatcttccttattctgcaaaagctctcttggcctaagtaaatcaacggaaaagtaacaatgatggcaacagcaagacaataagccagagggagtagaagagctcttagaaatggacactcatcatatattagaggaaaaatggttatagatctgatctggaggcataatagccaagttctggctccactattcatactgttagcgagtaatggtcatgtctattttagagatatgtgtaactacctctaaagtttcaaggaaatgcgttgaatttgggactctcaaaaataaagtctgttattaatgaagaaggatacctaaaaacaaagaaaaaacatatttaataatttaggaattacatgaaagtgatgacataggatggagtaacccctgacattcaaaacatcaagtttgaagatacatacattacaactgaacgagctgaggattagaacaattaatggataaataaaactacataattcatagcctctagttgtgttttaccttaacaatgagatgggcttgctctaccaggtgcttttcaggtaaggtccaaaatctaggtcatcttcttagatgtatattttcaatgtatatttgttggtgctggagtaaaatataacacactctatctcatgagtaggcaagccttcacactgagattcatatttatcaccgtaagtccttgattttgcacccatgtggcatgtagcaccctgccagggaatacatggcaccacaggaaaaacactgttcatctttctgggaaaattattttgatcaatattaatttcctgctacaattgtactcaatccaaaatttagctatcaaacatgcaattacactaaattcagcaacctaatacttgaaaggcaaatgacaattaaaaacagccgtttttttttattttactgtttgtttttattttcctaaacgtattaattttaaaattacatcttcagctggacacacacaatattattattactattgagacagagtttcgctcttgttgcccaggctggagtgcaatgacacgatcttggctcactgcaacctccacctcccaggttcaagcaattctcctgcctcagcctccagagtagctgggattacatgtacctgccaccatccccaactaatttttgtatttttattagagacggggtttcaccatgttagccaggctggtctcaagctcctgacctcaggtgatctacctgcctcgacctcccaaagtgctgggattacaggcataagccactgcgcctggccaatattatgaaactaagttaattgttcacatataagctgtcatgagtagtcatgacacagtgtgccatttcctgggctagtgcctttcacccaagtctataattctctacttcatttggcgatggaaaggcagatctctgccactcatattccttctttgcagctggttccttaataggctctgccaatacaagtgaactggaagactggaagatgaaaagagacttgcctttttatactagcatcctgttggctttttctctgttttctcagcctgtcagcttcaccctggctttgctcctgcaaccattccactggcagaagtttaatccagttttcagtcttccagcacttacagatcagcttcaatgtgcctccttctcattaactgtccagctcctcctcccacaaggtctcaggtcagtcccacaatggcactgaactcactcatctaagtttagtggcatccttagcagcagagcagcaagccatcctcagaggtctccaggtcccattcttcaagtgttaagtgggaacacatctagtgttcccctagtcacagaggtggcaactccttactgctgttaatacacccatgatttcttagtgttttctctgtgtcctttctgttcttcagcaattaatatccaattctttattttctctgtttaaataacatgtgcaatttctacttctcatctggatgctgattgttatatacatttatatgaggagtgatcccagaaaacaaatgaccaaaaatggtatttggaggttaataagataaatattttggattagcgtactcaagtgtgttgtatgttgctcttttatcccactccaaaatgttccactgtatagtacccatctttttgagtggtaggcagtaaaatttcagaaaactttcctttacctttgaggggatattttgatatactgagacacttggacctttaaacttcaaccagaatatgagtccctaaagttttggactgtttaccttccactttctgattgtcatatttttaagccgtatttgtccatttgcattgctataaagaaataccagaggctgggtaatttataaagaaaacaggtttattcagcttagagttctgcaggctgtccatgaagcatggcatcagcatctgcttctcatgaggcctcaggaagcttccaatcataatggaaaatgaaggggagccagcatgtcacatgatgagcaagggaacaagagagagaggaaagaggtgctaggctcttcaaaacgactagatctcatgtgaactcatagaatgagaactcacccattaccacaaggacaataccaagccattcaggagggatccgcccccatgacccaaacacctcccactaatcccacctccaacattggaggtcacatttcaacatgagacttggaggggacaaaacatccaaaccatatcagcatctcaattttttggtgttacaagtcaaaccaacataatcaaaattaaatattcattggatagactcaatggcaaaattaaaaagacagagtgaagagtcagtgaactcaaagatacatcaatggagatcatccaatcagaactaaaatatggaaaaataactgaaaagcattaataaaatctcaagagtgttgagataatactaaaaagactcagatttcttcctaattggtacacacatggaaaataactgaagagtcctgtagaggttttagaaactgaacaaatattgaaggataggttatagctcatcatgtgaacccagctgattgtttgagctgattgtttgctaaaacaatccataggacttttaaaagattcaaaatctaccacaatattaaaatttttaaggatacaatccactattacttgacatataaagaagcaggaaaatcttaataactttgaggaaaataaacagataacatcaatgttgaaatcattagaaaaataatttaaagcaactattataaccttccaactaagtggtcaattttgtaataagagcggtgtggtgctgagaagaatgtatattctgttgatttagggtggagagttctgtagatgtctattaggtccgcttggtgcagagctgagttcagttcctggatagccttgttaactttctgtctcgttgatctgtctaatgttgacagtgggtgttaaagtcttgcattattattgtgtgggagtctaagtctctttctaggtctctaaggacttgctttatgaatctgggtgctcctgtattgggtgcatatatatttaggatagttagctcttcttgttgaattgatccctttaccgctatgtaatggcctctttgtctcttttgatctttgttggtttaaagtctgttttatcagagactaggattgcaacccctgcctttttttgttttccatttgcttggcagatcttcctccatcactttattttgagcctatgtgtgtctctacacgtgagatgggtttcctgaatacagcacactgatgagtcttgactctttatccaatttgccagtctgtgtcttttaattggagcatttagcccatttacatttaaggttaatattgttatgtgtgaatttgatcctgtcattatgatgttagctggttattttgctcgttagttgatgcagtttctttctagcctcgatggtctttacaatttggcatgtttttgcagtggctggtaccggttgttcctttccacgtttagtgcttccttcaggagctcttttagggcaggcctggtggtgacaaaatctctcagcatttgcttgtctgtaaaggattttatttctctttcacttatgaagcttagtataaccatgctccaggaagtagagaaaatactcttaaaacgaatggaaagatagtctcagcaaagacatagaggatatgaaaaatagaaacattagaacctaaaaacaatctaagtttaaataactgaaatgttaaaattaatagcaaaatggagttaattgtgaaaagagtgaaatacatcaataaaaattatccagtctgagaaacagaaagaaaaatatttggaaaaaaaaacagccttgggtacctgtgagacaattctaagagtctaatatttatgacatcaaagtttaaaaaaaaaggagaaagaatatagtacaaaaataactaaagaattaatggctggtaattttgcaaatttggtaaaatttggtaaaataaagtttacagaatgaagaagctcagtgaaccccaaataagatgtacttaaaaaatctatatgcaggtaaatcataaccaaactgctgaaaatcaaaaacaaagaaaaaaaattgaaagtagctaaagggtgggtgaggggaatgagatgacaaatcacatataagaaagcagctatttgagagactgcagatttctcatcagaaaacaaaaataaacagatgaaagactaaagaaaatgtattttcatgttattttctaaaatgatggatcaatatatattacaatgatgaaggataattttttgtgtgtgaggcaaggaaaaccaaacaaaaattctctctgtattagaaaccttagagtttttactattctttgagatcagcagttagatggaataaatatagaacatgtgaaacttttatgtttttcaatctgatacaaaaccttctctctcaatgaaatctgtagaattttatttttcttgcctagaactgcatgaatatgtactacacataatagtttagtatactgaatgcctactaaatttttagtaagattttatctttggtggctttattgaagaggtgccacttcctattctattaatagtttctaatgaaaaaagagttatgtatgcagagatccgctgaatcacagaaagaatgaagtcctaataaacttgcaatgtagattatattacttttcaatactcttagcatttactgtgttaaaagtggcagttgaccaaaaaaactgattagaagataagaaatatgaagtatgaaattcatgtattttcatatagctcaagagtggcataagaaagagtactttgatttaaagtagtcttacacctcataaccacatgacataaaaatctcaaactaatgcattaagctgacaaaagtttccttgggtattttcctctaaggggatgtaaaccaatcttctctttagtgtccagataaagaaaactgatatatatattttcttgtctgaagaacaaaacagaaagcattgaaataatttcattgaaaaagagtttttttttaacatttaaagagcgactggtcagtcttttttaaaaaatctgtatctttaattatttccttacaaaaacaaattgagagagggcacgaatattgtgaggaaacaacagaggaagtagcatgtttttccaagtccccgagccatgtggctgctgctgggtgtcttttgtctcaatggtttcctgaacatgagtggaaaacacgactctcataatattacttgagccttttctcttcccggtcctcttttagcttggtcattgggggaatcaccagatgggaagaaacctttcaagtccatttctcctttcctatcccttcaacaccttctcatgtccagtggggttttcacaggttctaatattactgcaatgattcagcaagccctttgaattatgtgcaggaagggaatagtattctcttcctaattctttaaggaattcacctttcctttctaagaatgcaaaggaccaaaatatgactcctactggattaaataaaataatcactatggagttaaatgctatattttcaaagtctgggttggtaacaatagaataggagggaacaagcaggtcatccactagtattgctttcttgagacaaaacactaacctaaaagtcactggtatacaaccatagaaatgtgaaggaaactaaaattaatagcaggtataaacgataccaacactgacattaatagcacctggcattcaaaatactcctccttgctcaactagaataaattttaactataaaaaagaagctccttgagtctttttccatttataatcctttctatcatagggccagaaaggggccaggtaacaattattgttaacaaattctagtctaataggtaaaagtctcccatattatattagtccatttttacactgctgatgaaaacatacctgaaactgggtaatttatgaagtaaaagaggtttaatggactcacagttccacatggctggggaggcctcacaatcatggcagaaggcaaaaggcacatcttacatggcagcagacaagagggaaaatgagaaccaagcaaaggggtttccctttataaaaccatcagatctcatgagacttactcactaccatgagaacagtatgggggaaactgcccccatgattcagttatctcccactggctcctttccacaacacatggaaattatgggagttacaattcaagatgagatttgggtggggacacagccaaaccatctcacatatatgtatcatattgactatgggaactaattactctgccttcctttaccccagaccctttcatcttctctttcctgatctctaccacaaggtattatatcagacagaatacagagcactcttttctcttaactcctggcttccagttgggtctagccaatgggaggttcttgtcagtgtccagatatcttctccctcactcaggtaacaacaaatccttctgctgacagcgtttcttttactcattttgttcttagaggttctactgacttatttttcatgttttatatgactccagcactgatcatatttatctgacataaggtacaatctgactccagttgacttcatgagtcacttcaatggaactttggaacgtggaaataagaaacttctttataagacataaaactgaggaattcttggttaacatgtctaccagacagagaaagttagtctagggagaaagatcaacacagctaatacttagagatgaacagtgagtattttgacagtgcttaagtacttcgacctattttttttttttctgaggtgcaacagctgaatgcttctgtttattttggcttgatggtcaatgcttgcttagattattgagtttcctcagtacattttaaataaatctaataaatttctttttatgttaaaactgtaattaattcaaattctatcttctataatcaatttgtcgtaattaatataataacaaatgggcttgaaaagtgcaccctgctgcagtgttcattttaggttgtagaaacaatgtaaccaaagacactttgtaggggaattttctttttctggtcaccaatttatccagtaggatacttaaagtttatagaactctggagtgtagctgttatgatacactatttctgaatttaaaaattcaatgcccacgctatgtttaaaatgtacataagacatgaaaggttcctggtgtggtttttaaagtgcttctcagtgtccagccacccttaagtgctttgggaaacacacttttaaatatttgctcatcattgatatagtttgtggacccagaaagagtgagaactgtgttcaggaggtcttaaaggaaaatagtaccaatttctgaacttctaagacagccctaagtgaaaaggcaaggcatatgctatggccataatgtgctgctgttgcaattgctgaaacccagtcacagaagtcagggtcctcgtcagtcaagaggagacaggaaccatctttctaaacatgtgactcttcctctgccaggataggtgctgccccatcctgccagtcatgggagtgagcaacccaatacttccctctctccgctattcattctcaaaagaatgggaggtaacagaaaagctaatttggggtttacccatattctgtgcctatgaatataaccatttattttgtggagaaagaatgttcattactttcattgaaaaataaaggactaattcttattcagcctaacacaccaatgcagtcccaaaagaaaaggaaagggaaaatattttaaactgttcaatttttgttaaggtacagtggaaagaaaatcttccttcttctgcccataccattctttctgtattcaggatattgtatgtcataggaaaatctacttcatcccatttcacagtggctaggaagtatacattcttgtttatctctgtgaggcatattgaagacctcaccctattcaacccagaagaaagtcattaaaactcagtaaaagcagggactatcctttctcctatatgtgggaaaattcttagctcatattacagtgctaaggatagagtaaataataaatatttattatttatttgagactgactcttgctctgtctccaggctggagtgcagtgatgcaatctcggctcactgcaacccctgcctcctgggttcaagcaattctcctgcctcagcttcctgaggagctgggattacaggtgccccctaccgcacctagctaatttttgtatttttagcagagatggggtttcaccatgttggacaggctggtttcaaactcctgacctcatgatctgcacacctcaaccttccaaagtgctgggattacaggcgtgagccaccgcacctggccaataaatatttattgaataaactattaaaagggtagctattattaattatgtattaatataatataatttaagcactctcccaagtcttcaagtctaacagacaatttgctaaggtgatgggatgtaatggtttgaatgtaagaaatttatcgacagaatttttttttaattcaaatgaaatataagaagctattgccagaaacaggagggtcaaataacatgtattttagagcatatgttgcaggtaggtccataattaggactagacatgcctgtgagatttaagcccctatgttgtaatatgtgtttttgaatgtgtttttcatgcaatagcatgtgataagatatgaataatacaatgtaaaatttaattttactttattttaaattatataagattatttgatatatattatctgggtgatgaatacatgaaagacccagactccacctctgtgcaatatttccatgtaatgaaatcgcagttgtattccttaaatttagacaaactaaaaaaaagttttatagacagaaggagaaaagaataatgtcatgcatatataattaaatgtctttcaaatttagtaagtgcatgctttgaagctagtataatccaaattcttcacctgggtttgtttttttttttttttttttttgagacggagtctcaccctgtcgcccaggctggagtgcagtggtgcgatctcagctcactgcaagctccacctcccgggttcacgccattcttctgcctcagcctcctgagtagctgggactacaggtgcatgccaccacacccagctaattttttgtatttttagtagagatggggtttcactgtgttagccaggatggtctcaatctcctgtcttgtgatccgcctgcctcggcctcccaaagtgctgggattacaggcatgagccactgtgcccagcccttcacttgtattttttaaggaaataaaatggatatataatcctcagcaaaactgcctaatatcaaatttatttttctttcaacaaataatttttcttgcacaatgcagctgtgctttgtgcaattttctcttcagcttcacttttctcttcaacttcactaaaataaaacatctgtgtttcacattcagagaggtgtttttgttttttctccctattctctcccatttctctccttattctctatcacagaagccctgaactttctcgagagcaaatagtcattcaaggcagagtcctctgtagtcagaaaaggggaaaggaaaatcaaggaactctcaaaagctgatacattttatcctgtaacagcaacaataaaagaagaaccaagtaagaaggcaataagcctctatgacagaattattttgtatagttattatttttaaccctataaattgccattttagttaattaaaaatgattgaacattagttcttttgtatgatgcagcctaatataacaagttacatgaaataaaaaactattcacatctttggtcttctacagtaaaagaagaaaaaaggtaggcaaaataagcatcaaataatccaatcatttgtgttacctctattctgattcttgtatgtgctaccgtttgccatcacaagaaatgcggaggcagttatctccactattaaatttcttataacccaaaccttccggtatctctccatgtcaggtagacacctctcctgttgcctgtcctatcaggtccacaataaatatcttgctaattctgcaaacccacaggggtccccaaccaacacccaaactgatctacctactctaaacgataatactacttctaatattttctactacatttctaaaacttttatttgtattattccctacattttaatcatttttgaaaagaaaaaaaagtgtatgttttgctaagtcaaatagttgatcaatttcttttttgtttttatgtaagttattccatgccaaaaaactatgatattattttaatgccagtgtataatgtcaatgcctaagatcagaaattaaacaaattgatgttgtgaactttatcagctggaataaaacaggttgattgtaatttgcagcttaaaattggttaataatagcaactgaagcccttggaaacgtgtataaaactcctttcacacgtgcctaataattctagtgagattattccacagggggaaaaattaccttcatcattgggcttgcaaaaaaacaaacagaagtggattaatgtaattgcttaatcaacaacattcagccaaaagtctccaagagtgtagaattaatcatcttattgtaagattcattaaaatgtaatgggtagagtgagaacactgcacagctggcagtaattttgtttcattaaaaataaaaataaatacaccttgaaaaacactattttgacaatattttgctccataccttgtcttaaaaacaagtattttttttcactcatgtactgcagagcaccagttacctgaaatctgtgaactacaaaagtcacaggcagcatgatctttttcagtaacactccttatcccaaaagaacttctttcccctggttaatggtcagtataagtgtaattttttttattattcttgactctacaaagattacattttcaatacactattttagagtttttggaacctaaaatctagttagcaatttatgaaataaaagtttaaaaattgcatgtaaaacttatttttaaatataattaaatagattaaagaatatcaatcactggggaaaaacagaaggaaagtagcaatagtcgaagggggtcaattattatatcctttgacatttaagaaagcattattacattaccattaactctagcttcctgaagacgatcaagtatgaaatcatttcttttggaatgtctgctggcatttccaaagattcatcattgttttggggtatactggacagttttgattcaactttaaatcgacaaagacatttggctgttccaacagattgtttaaagggatgcttctgttttattctttctttatggtacatgtgcatggtcaatggccactgagtttaaggatccttgaactttgccagtcattagatcaatccctttgaggacatgtttagaccctaatatgttactgacttttgttatccacatatgatgttaggggtaataatactaacaacagcaataattactaaatttagtaaatatgtacacgtgagacactaaactaagaacattttcctttacccctattttcttcccatttgcaacctttaaaaaatttcctcttttgttcataataatttatctcatgctctgagtttatgtaccctacccagcaagaataagcttagaatgtagcccaggaccatctttttttcctcaaaaatttcccatgagcatttctcccacccttgccaagtgatgtagcaaatatttttccaacattaaagaaaaaaaaatattctcctgcaaaggaatatttttccatattgttacattactaatgattctagaaggttaatgtgaattgttactgcaacagtctccagctctcattagaatcacctgataaacattgaaaatcctgggaccccactcggacacagtgcttcagcgtctccaaggatagacaaaaaacgctgaatgtgttttatctgtttcaggggatccttggaaggagccaagtttgggaaccagtaatgtaggcacatagctttatttcccagtattttaccaaaatattttggcaagataccagaatttggccatattgaggagatattgatgatctgtctcttagtcaatcatacagtgtcatttgattatcttctgtttcatcttaattctttgaaaacaaatactgtatttgtaaatacaaattgggcgcttaacaaaaaccaggaataaatattataagacgagttcgatcaataatttactcaccaaatatgtgtgtgttggttgaaatggaatcaggttgaggctttcaggatatgtttgttaaattgatatttacttgcattctgatgaagtaaaatttgtaaagggtttattttttattattttcatttttagtatacatgagctgacgtacactaagatcttaagtttatgctgttcatgatgtgtttctgtttgtgtgtgtgaagacgctgtgttattgaaggctactgtctacagcaagcaggatactaataattccgtattattaacatgttcatattaagactgaattgttggtaatatctttcatatatctagcactttgtggtttataaaatattttcatgtagatatttctttaattgcaatgtgtaccttttattcacattttaatattttttaaagaatgagattaattttaaaatcaatatgtttacttaatgtgcaaaaaggtgttatttcttcaaaaactttctgtgagccttataatccatgacatctcgaaatgaagtgtatgtggtattattctacttgtttcaagactatcgaattagtagggcttctgttttcctcaatgaagcaacaaggaaattacagcacaattagaatttaagtatttaaacttgaggttgcttcccagtggattgtacggctgctgaggttattacatgccaaaatgtatacttattttagcaaggaaaaagtattcagcctgtctctgaacacagaaatacagacagacaaggaacacagtggtgcacagtatgaatttctctagtaagcgtttccaagaggaaatatgatatgtttagtttcaactatcctttatacaagttgaatcattggtaaacattgcttattagacatgtggcccaggcaagtatcctttataccaactagatcatgtgataagtattgctcatgagatatgtggcccaggcaaagcagactccattctttccatttctttgtttgccgaagaacgctaactacctaataccccatggtaatctctggcctgtgaaacatgccaaactctgcctgtttctctcaacctggtggtgacagcttccagctggtcacctgatcaatcatacctgtcattggcctccgtgtctagagcgcgattgcttttgtttgtttgttttcttagtttgcttcactgctttactggcaggctttcttgcttgtccattaaaagccaaatgtgaaagtcgcaaaccacaccatctgggagaaaggaaaaaggcctggcacatctcactggtcttgattctatcaaagctcctagaggctgcaggtattttcctcactgcgatgttttggctgcagttggtagcgatgaaggaagaaaggagggttttgttgttgttctgtttggttttcttttgtttttcagttctctttataactttagcatgaattggagaacaggagaaaatagaggatatatttgagaaggtccccctctaagaaaatcttcttctacttggccatgcaaatgaaaccttgaatccttacagacaagtgactcttaaaaaggcttttttagaaagtaaaaggcctttttaggctcctggaaggaaagtattacagtttatatttatttattcatcaatctacgggagatgtgacataaagcactcctccgtttagccttttttttttttttcagtttcaaaatgtgaagtttaatggcaagcaggatctacaatagcttatcagtcagtactcagggtgaatgtaatatataaacacagccatctccctcaagcatagaattttacatctttagatcatctttcgtaaggaattctaaaaaagtcattcacagataaacctttttttgaatgtttctctttctatcctcacctgtttgtacatcaaaccaagttaccagctaagagttgtttcatttttccagtgctactacaacaggctaggtgatttcatttctatttctgcagaaacaaagaagaaaggtcagtcagtgttcctgtagtgtctgttaccttttttgaagactgaaaaagacatgtcatgtgagtgggaaataaggacattttgaaacagtgtttagttagttacacaagtctaggaatggtgcagagtagatacaaaggcaaggaccaagtccctaaggaatcatcccggatgagcagtattcctatatatatgtaaatgcaatcctgaaaacagtgttttaaagaagtgggagggactcagccaggcacagtggctcatgtctgtaacctgaacaccttggaaggccaaggcaggaggatctcctgagcccaggagggttttgttttgttttgtttctgagatacggtcttgctgtgttgcccaggctgtagtgcggtggtgcaatcgcggctcagtgcagcctctgcctccctggttcaagagattcttctgcctcagcctctggagtagctgggattacaggtgtgtgccaccatgcctcgctaatttttgtattttcagtagagaaggggttttgtcatgttggctaggctgagcccaggagtttgagactagcctgggcaacagagcgagatcccagtctctacaaaaaaataaaaaatttagccaaatgtggaggcacgttcttgtagccccagctacttgggaggctaaggtgggaggattgcttgagcccaggagtttgaggctgcagtgagccctgatcacatcactgcacttcagcctgggtgacagggtgagaccctgtctcaaaaataataataattattataataaagaaagaaggggcaaaagcatatataaatagataagacctctattccagagagacaaacaaaaaaatcccgggaaacaaatttcttgctaccgcttctaacactatctgtgatactggtaatgttcagagaaatagggctgagggatgaggcatgcccagacagtgttcttcctgccgtaactggggaaaaaatcaaattgaatcataaacatatgttcagttcccctcagagcaaagagagcctttggaaaaagaatacccaaataagctacttgaattcctatgtcctcttctccccaatcagcactaccatttaaaacattttcttctttttatgctgatttcattctggagcttaattcaatgtaatgttgttattgcttacatcatggggttgaataggtgggaggtagggagaggaggtaggtgtgtaagtgatgaactgaagtgataaattgtttgattgcttggtgagagaatgttgccagtgtatgatagctggagtacattagagttaaacaaggtgatgtgtcattgcagtaaaaaaaatcgaacatttctgaacctattattacctatgattgaagcttcctttatgtaagtaatataagatatatttcatcattcctacagaaaactatattcttactttcagtggttcctataaccaccagatattctatctaataggacctggaaatgagatttaaaatataacatgatacaaaaactgaaaggtttacatagggtgattaagcttgagttgcatagaatttcttacttgttagctcactgttatcttattacaggcatattcaaaataggtataatattacataagttagttgcagatatacatatatacgtgtatatatatgcatacatatatatgtatatctgcatacatatatacagacatacatgtatacatatatgtatatctgtatatatacacatatatgtgtatatacatatgtgtatatatgtgtatatacatatatgtgtatatatgtgtatatatgtgtatatacatatatgtgtatatatgtgtatatatgtgtatatacatatatgtgtatatatgtgtatatacatatgtgtatatatgtgtatatatgtgtatatacatatatgtgtatatgtgtgtatatatgtgtatatatgtgtatatacatatatgtgtatatatgtgtatatatgtgtatatacatatatgtgtatatatgtgtatatatgtgtatatacatatatgtgtatatatgtgtatatatgtgtatatatgtgtatatacatatatgtgtatatatgtgtatatatgtgtatatatgtgtatatacatatatgtgtatatatgtgtatatatgtgtatatatgtgtatatatgtgtatatatgtgtatatatgtgtatatacatatatgtgtatatatgtgtatatatgtgtatatacatatatgtgtatatatgtgtatatatgtgtatatacatatatgtgtatatgtgtatatatgtgtatatacatatatgtgtatatatgtgtatatacatatatgtgtatatatgtgtatatacatatatgtgtatatatgtgtatatatgtgtatatacatgtgtgtatgtatatatgtgtatatatgtgtatatacatatgtgtatgtacacatgtgtatatgtatgtgtacacatatatacacatatatgtgtatataatgtgtatatatacacacataatatagatacgtgtgtgtgtatatatatatacacacacacacatatatatataataaatagaatcatggtgtttcaatcaatatctttttttttttttctgagatggagtctcactcagttgcccaggctggagtgcaatggcaccatctcagctcactgcaccctctgcctctctggttcaagcatttctctgcctcagcctcccaaatagctgggatttacaggtgctcgcctagctaatttttgtatttttagtagagatagggtttcactatcttggccaggctggtcttgaactcctgaccttgtgatccaccagcctcggcctcccaaagtgctgggattacaggcatgagccaccatgcctggcctccatcaatacctttaaaggaaccatatgatttattcatagcataagttttgagagaaattggaggaaaaatagcttcagtgatcactccatcactgtgccaaatcttttatttcctgtgtcattgctacttataacaatgtaatcatcaccacaggttttatatagaatggtgcaactagtcagggtctagggagaattttatcttgcatcttcaattgtagatgatggaattcagcaacaataagaacttatatttttgatggcattatgtgtcaagtgatttacatctacattgcattaaacctaacaactgggcaatgtggcatagcgtccatacatgccatctttgtaagcatactgcctgggtttgcccctcagctcttgagcttgggcaagtcatttcacctgcttgagactgtttcttcatatgtaaatgtagatttaaaagatagcacttacatgttaggacttatatagacatcagataagttaatatgcataaagtaccaagaatgatctcaaacttatgattaacgtgtaggcagtcagtgtgactcattatactatactctctcaatttgcagatgaggagcctgatgtttagctagcataagtgacttgtcatgtgtattagtcctttctcacactgctataaatgtgccacctgagactaggtaatttataaacaaaagagctttcattgacttacagttctgcatggctggggagacctctgtaagcttacaattacagtggaagacaaaggaaaagaaaagcacatcttacatggctgcaggagggaaaaaaggaggaaaggagaagtgctacactttataatcatcagaacttgtgagaactccctcactatcatgaaaacagcatggggaaaaccacccccatgatccaatcacctcccaccaggtccctcactcaacatgtgaggattacaattctagaggagatttgggtggagatacaaagccaaaccatatcattcggagtttggggcatttctctaaagatacttgaaaatgtctaagcaacatgggaactgggtaacgggcagaggctggaacagtttggaaggctcagaagaagacaggaagatgctggaaagtttggaacttcctggagacttgttgaatggttttgaccaaaatgctgatagtgatatgaataatgaagtccaggctgaggtggtctcagctggagatgaggaacgtattgggaagtagatcaaaggtcacttaccccttccctagagatatgtggaagtttcaacttgagacagatgatttagggtatctgggagaagaaatttctaagcagaaaagcattcaagaggttacctggcttattctgaaagcattcagttataggcgttcacaaagagatgatttgatattgaaacttatgtttaaaaggaaagcagagcataaaggttttgaaaatttgcagcctgaccatgtggtagaaaatgaaaacctattttctggggaggaaatcaagccatcagctgcagaaatttgcataagtaacaaggagccaaatgttaatagccaagacaatggggaaaatgtctccaaggcatgtcagagatcttcacagcagcccctcccatcaggggcctgtaggcttaggagaaaaacaaatggttctgtgggccaggcccatggccccactgccctgtgcagcctccagacttggtgtcctgtgtcccagacactccagctacagccatggctaaagggggccaaggtacagctcgggccattgtttcagagggtgcaagccccaagccttggtgtcttacatgtggtgttatgcctgcaggtgtgcagaagacaagagttgagctttgggaatctctgcttagatttcagtggacacatggaaatgcctagatgtccaggcagaagtctgctgcaggggcccagccctcatggagcacctctgctagggcagtgtggaagggaaatgtggggttgaagcccccacactcagctgtgagaagaaggccactgccctctagtccccagaaaggtagatacaccaacagcttataccatgcacctgaaaaagccacaggcactcaacgccagcctgtgaaagcagtttcagggcctgaatcctgcagagtcacaggggcagagctgcccaaggccatgggagcccaccctttgcatcattgtgccctggatgtgagacacggagtcaaaggagatgattttggagctttaagaaatgccttgctaggttttggacttgcatggggtccgtggcccctttgttttggccaatttctcccatttggaatgggaacatttacctaatacctgtacccccattgtatcttggaagtaactagcttgcttttgattttacaggatcctaggcagaagggacttgctttgtctcagatgaaactttggacttggtctttgggttaatgctagaatgagttgagactttgggggaccgttgtgaaggcatgattttgttttgaaatgcaagaagaacatgagatttgggaggggctggggtgaaagaatatggttttacctcgtgccccctcccaaatctcatctctaattgcaatccccatgtgtggagggagagatgtggtgggaggtgattcgatcatgggagcagtttccctcattctcctctcatgatagtgagggaattctcacaagaactgatggttttaaagtgtggcacttcctctttgctccttctctctttctctcctgctgccgtgtgagatgtacctttcctcccctttgctttccaccatgattgtaagtttcctgaggcctccccagctaagtggagctgtgagttaatgaaacctcttttgtttacaaattactcagtctcaagtagcatctttatagcagtatgagaatggactaatataccttatgtcacagaagttgtaaatgtatcagcctggacagactaaagccggagccttcccacttaaatacaacatgaaaatgccaattcagcattcttttcacaaacatttactaggtagtgaatatgtgccaagcactatagtaggcacccaaaatgtgaagatgattatggtgtatttcaaaatctaatgtagaaaataacatcttggcagtcacacagctccaaagtggataccaagtatttctctactcccacctctccagcacctcctcttccttataatgcttctgtcattacaaaactctactctgaccatagggagtgaggggaggaacgtaactatgcaaatcatgatagaacatgaaacacagcaatatgttaactcagttgtgtaaaccatgaagcctaaatctcaatagggtttatcctgtgatagtaggaagatctcatcttttatacccagttataaattttaaactttaggaacaaagacaaggaataagcccctatcccgagagtttaataacttacagccttctaataaagctgtattgcttgtgatgtcaacagtgaattatctgaacagaggcttgttaaacagcattgtgaaaagtgtgcataactttgccaggtatataccatcacaggatggaaggagaaatccacacagaaataaaaagacctgattttcttaatgcataaatttatactcaagtgggtggcaacaagagtcttactaattttaagtaagatagtaacatgttcaaagacatggaacagcacttaggcagcaggatggaatggaggcatagatgggtagaggtttgggcatagtgtgaatttgtttaggaacaaattcacaatggctcatgcaagagatttgccctgtggcagtgataatctaatgaatataaggagatatatcttttaaaaaatagctaatatttactctgtgttaaatgtgttattactaaaattccttccatttttttaaagaaagaatagatgagatttatggtctcttgtaaagctttctctgaacacatttaggttttgttttgttttgttttgaacacgattttattctccaagttctcagccagccaaatcgtgctttgtcttcttgttttggtataatgcctgaacaaggccttacaaaatagcttcctgtctggcttgtttgaaacatacctctttactatctctgagctgagctgtgaggaggatgtgaagtccgcaagtataaggtgaaaataaataaccatccagttcaaacaaaccacttgcctcagtcagtagttctggcccacattcatttgtacccaacaaagtccctcagctatcttattatcacatttctttaaggttaacccctcaaagatgatcttgttttgaagttctaaacatcgcgccgcatgcaaaatgactcaggtattatcatatattgatgattcatgatgttcttctggaaaatgaaaacttagtcatctaatcaataaaatcattttaagtctttgaactggttccaggtcaatttttcttggcagttttttggcttcctgaattatactgacccaaaccatgaataatgatctaaaattgcacaatatacaaaaaccatctgtttgataggaacaagagggtgatgtcatggggccacttcttatctcaattttatgtcctgccagtgctgatgtcactggcttggcaacacattggcagagtccaacttgttaaagatgagtacgttcaagaaggaaattgtatcactgcgtggagagggacttcttatgttttctggattggagatggactaacaagaaatggcaagagctgacaataaaatggctagtatatatttcactgcagtgattaacgtattatagttgacaaatatagtgtctcttcctcatttgcattttccaaggaacaaagtccttcatcttctaaaaaggaaaatgttgcagaacttttcacaggagtaaaatatagttgcaccacaagaagatggtagggagtagtcttaatgtttgtgtccagaagaaaactggggcatcgcactgaatgtgtctgtaagatagattaacactgtatcaactacaaagttattgatatatatgtaagtgttgtatgtaggaaccgtgaggtaattgtccatctatgctcaaccctggcaggtttatccatttttgggtccagctactaccaccaccaccacagaatgatatggagaattttgagaggattgagagaaatacaacaaaaatgattgaagagttagattgtcatttctcggtaaaaacgttaagaaacttgaggtgtttgttgttgacagatggatagtaaagatatgaagggcacagactataggattccttgctgcaaggactattgcttatacaccccctactgctgaagctttaaggagttatcggccgggcgtggtggctcacgcctgtaatcccagcattttgggaggccgaggcgggtgaatcacaaggtcaggagatcaagaccatcctggctaacacggtgaaaccctgtctctactaaaaatacaaaaaaatgttagctgggcatggtggcaggcacctgtagtcccagctactcaggaggctgaggcaggagaatggcatgaacctcggaagcagagcttgcagtgagccgagatcgcaccactgcactccagcctgggcaatagagcaagacagtcaaaaaaaaaaaaaaaaaaaaaaaaaaaaggagttatcatagaaagcaatagttaattaccttctcttctcttttaatggtataatttttgtctgaattaccaatgtacagaaaattgagttttctatttaaaactgtgtcagagttctcaattttcaaatcaaatcgagtgaatgaagttcaacccacttatgatttgaaggcttctgtaatgagtttttgaaacacatttaaattaataaatgtttaagtgtatatgtgctatctgatcaaaataaaggtaacttacagaagctggtgccaattatgactacgcttaaataacatagtgatatagtaaacaaatcgtgaactcttggggatatcttggaagtgaacatattaataattttaaattaagcatatacaacattttgacagattttcctcactcaaaagaaagtatatagccaggcaggaaagttccagagaggttgaggttgagtcttcattctaggtaggatgatggtggaaaaaaataaaagtgcttaggacagggcaatctatgttttcttttaaagtatcattaaaacacattaagttttaatctgttttacttaatttgaagtaaaaacatgtataattgtacaaacacataaatcatatttcacgttatttcaagataatttagtttccactgtgttaaaagaaaagaaagagtttgcaggcctgaagaaagaggcacagaaacagattctagtcacgtatctcaaactttttcttcagaaatattagaatttattagtaattagagaagtttcttaaagtagatcatattcttttgaacttcagagagtagaaattgagggacttaaaacattttcttacgagaacatagaaaaaaaaacatatctgaggcacgtgttttatgagattaagaagaattgctaaacaattgtaacctaataccaagacccagaggggatggctcaaggaaagaaagttttcttgattacagcctagttaagcaatttaattaaaatggctgctttaaaaatatgtgcaattttgccaatggtaagtgtgttttctggtgacatgtagaaacactgatgagtcccagccaggataccattacaaagacaaaaggtcactgggctctccttacaacaaacacatgttttccattgactgtctcccccatggtgaatttccttgccactcattagaatttattgatgcataattcccctgcaaaatagattatggaaaatgtagtcttacataatctttgtcttctttctctgaagaactgagtgaaaggtgtatcacagtggccatttttgaggtgacgatgaggttgaggaaagaggaaaggcggtgagctgcacgtgcaaaatgtccatttcccattttgaagcacacaaaggcctttaaatgcttcacttatctcatattgtaaactccaacatgaagagaaatattcaccagacaggtcataaatcatgcccaaagacaggtgcaataaataccaatgtcaaaaagttacagagtaaaattagattgttttgacaaggcctccagatgcgctgacaacagggcaagtaaatggcctcttttctgagagcccacatcactggtacatgggtggggagagggaccccaagccatcataggaaaaagtatctcagaattttaacacttgtcacccttactacactatcctcaaggaaatggccagcaaggattcctccacctgtgctatgaagtcatcacatgttaaaatgttactgatgaaaacatatcaacataaagtcaaataccatggggaaggcatttaacatgtatataatgcccaagtggaaaatatgcttgcaaatcaaattgttgtaaatttcatatgtaaatatttttgtataatagttataatatacataatattgtatatataatatatactctttaatgaagttacagttatactcataaatgaattatagatgcttatttgtttaaatctagatttttaacatacttaaatgaaaatacttttaagttaattatattgctgcttaaacaaacactttgattgaataaatttaacttcacagaaattcaggcatcctagttttctcagtaaaggtactggttgtaatagaaattgaattagaatggcacacattatgttgttttacatgatgttaggtacgtatagatataacagcatgccaaaaacaccatcctcttttgttgtgtatttcttactcagtcacagttgtatgaaaactacaattatttcatttagcaattgataaaaacttgtatttatgttcatggtatagatatgtctagctataggaaatgtattaagagccttatgtaattaactgaatagttcaacttcctaaaacagtttcatttgaagtcaataaataattgcaataaatttaccagaactttgagggatagcaataatggttaaaataatatggccctgtgcatagaaatgtttagtttgtttctgaatgattcaattttatagttatgttttaatagcaatctctatttggtcaatttgtctcaatcaattcaatattcagagcctgacaaccaagttgtgctgaattcaacaatttgacaaatacacaactgaaaagagtttcaatcttctattatgtctgaggtaaatgaaagataggtacgacatcatctcaacaaccttttaccccgatacacttagattaacatggaatctcacttccatcctctaatgtcattgccagtttagaatcacacaaaactgaggttataaatttcaaaacagtttataaacttccaatctgcagactgtttaagaagtcaactcaaatcttatttctataatccctctagaagtggctccacaatggtaattcaattataaattcctaggttgaatttttatttttattttctctcttttaggaaagaaatcaccaaagtatttctatattgatatggttgatattccaaagagggatatattattttgcattattttagtcacatataatcagtcatgttattttgccttatttctcaggatgcaattgagttacctacctctgctgaaaaaatggattattttgctaggttgtgtgtggtgagttagacttatgacctagggaagtagaagtcaggagggaaggcctggtagcagcatcctataaaccaggccaatgtgttgccctgaaaaggaatgcactgccataaatgaaggcacttggagggcaagggtcatagtatgtaattagcgcaggccatttaaggaagaataagaaaataatgttttacaagctggtagaaagagaagcaaataatcatttaaatgttccaattgtgagttccgtcagtgtgtgtggtttattttataagcaactttctttactagtaagaggcaaagcaatactgggaaatgaagtgctcattggtaccctgcagtatgcactacagggcccttcctttgaactgctttgcataaggtttatttccggcactctgttttgttctcttaccctaagactcatggtgacattggacaaatggtaaaccaaagcacataaaatatgaaaatctctttaagctatgatagacatttttgtccagtttcttgaaggaaaggaataatagattatggtttataaaaatgaggcattcacaaaagaagccatgccgaaacactttttcttggcagcccagccacctaatgtttaagtgacccattaatatcactctggggaatactcagttgcccatttcatttaaaataaatgaaatgaattttcagctgtacattcagtattgcagctgacttattgtttggtataggaaatgacttctgtataagcaaaggtaaattaaaggtcatgttaaaggggtattattgccttcagtgcatgtttataatcacacattgtttatacgtaggaaaacagaagcattaaactaagttttttgtggtttcttgttattaagatattgggcagccaaatcactacatatatatatatataatatgtaaaatctccatatatgtatgtaaaatatatatatatatgtaaagtatatatatgtaaaaatctccatatatacatgtgtatatctccatatatatatatatatatgtaaaatcagagtaaaatatgacaactaagcaaagattaaggcaccaatttaatttataacgggtgctaaatatatgtactatcatttcctttgaaatcctatgcagagtaacatggatgatatcttattataaaattgttacaaggcaattactctttgctatactctacacagctggtcaatccatagttgttttttcaattccaggttcaagttacattttattgtttattgttttattttgaaatatttcttcttggcacccttaccagaaaagtcgcaatctttggtcgaaatttgataatggaagattagtttactggtcaggatattgtggattaattaagatggaaatctggaaactggttttcattctttgtttcctacagtgagcagtaaaagaacaaattaatggagtgaaacatgatctcttggctgctaaattccaaagaacaaatgtgatatttaattacttacagatattgagcctttttcccccactaattttaattttgtctccccatttgtaaattatttggtgtttttgtttgtttgtgccattttgtttttaagttagaactcatacaaaggtaatatatcaccataagccctgagggcatgacacagaagattcacttacaaaggacagacactctttctaatgggtcacaacattcctctgatggataggagtcactaaactgacaataggttgcttgaaagagctctcatctgagctttaatccttatttgatttaacattttatcttcattgaaatatcttaaacatttgttgaatgataaaatcaggatgtttttatttgtattccctgagagctaaaattaaacagaagatgcacgtatttcacttcccatattttagagaaattatttgagctacactaaatacagcattaataaatctgactgtggcttaactatatttgttcttcttaattaactccacaaaatatctgccattatcttacatattaacttcatatgagaagaggaataaactcaggaacctcaccacacaattggttaggaccacacaaattgtccattaattattctgtaaatacttcatacagcaggtctgttttccccagcaagattataaactccttgaggacaagaattataaacttctaaaattcctagcactatctaaagccaaaaataaatgtatattatgtatcattcaaaaaaatttaagctaaatcttttttaaaacgacaatctatcatagatgttcattaatacttttaagtagttaaggtttgctatcttagtagtgggaaaccccaaaagggagcaaacgagtagggaattcattgccatatggctcgtcagattctataaaagatgtagaatcttaataagttcaatagcatttcctttttgtgcctagaaataaatatcaacagcgtagcacccattttaacaattatctcttaatgacaaaaataatgcttacactttgaggaaacatttaaaaaataaaaatgtataataagaaaaataagaaatacaggcccaactccagagaaagcgcattaattttgtatcttttcttctaggcttatttgtatattttaatctatacaaaatttaaagattttacaaatgatgaatcactttgggtatgcagttttagtatcttggttttctcatgtatctgtatacaatgatagttttctcatttaaagaaatatcccataaaatattttaagctgattcattaaattctatgaaaaatgaaaaaaatcatttaattttttctttttttttggctttttattttagtatttctctaagaactaaagtgccaatagcactaaagataacatctttgtgtgcatatttgattgtcttattttgtggtgaatttcaagacttaaagtagctaatgcaaaaggatgataatttgtattaattttggtatactataccaacagttttgaataatatgtatgtcagaaggccttaagaaatagagcattatgtctgctgtaattattctctcctcttttctgccacacatagccacatggctcagtcattatcttctgctatttagtatatttaataccaaaggaattcctgctagccatctgcttttctatgttaattcttgccctttgcagttttccttacaagatataatcatctagaacagcaggtccctacagagaacttgaacatttgcttttaatcaaaaggcatagtttatattaaactcagtaaacaaaatcaggggacttgtataaataacaatttgtgcatatcattttcatttttgctgacacttttgactctggtattgatctttctccaggttgtgaaactcagagggcaaagtgcaaagttcaaaagtggctatttgcctcaaggtttattgaaaataaaacatcaacggaagtcctctgaagtaatttgaggaaactttttttttcttctaggaaggatgtcattattcagtttctaaggttaagtctgcttagagaaaaataatagagtgaaaataggcttgaaacattagaaagctggcagaaaacatctatataattgtgggactgaatgcaagtatgtaaaatttccaaaaacaaacattgcattctatatggaacatctctttatctgttcatcgtccaaatacagaaactatagctccatcttgccaaatccatagtatgtggactgaaaaaaaaaaaaaagaaaaaagaaaaaacagatgcaaaatgaataaggaaagagtacatttaaaaaaatacattttttaaactggtttaataagaaaattaattttaaaaaatcagtacaattggattgtcatcaagcacctaaaaggcacagctcattttttcaattgtcctgttccaaatgattattttgtttcatgcaagcacttgctgggaacgtttccatgctgaaacaagacaagtgcaggcagagctgtttttaatttttaaagataactaaaaacatacagaaaagccttccaagcttgacttgaaattgttgtatctaaagattctcaatgcatttattaggaagtgtccatccaacttaagagaattttaacaggcgtcctaaggtcagactgcaaatcaggccaggagtcaagagcttcagtaatcttttcccagcgtcatgcagtagatcctggttattttcaaccaaattagacatcattttggatgtttattctcccaattatctccttacccccccaatccttctaagtttctttatggttttatttaaaaattctcttagttttttattgcgagagtaacttaagtgtggtctatttgaaatcttcatcacatataaagggggaacacaaaatcatttatgtaataagactccagctaacaggcaccctccagcaatctgaatgcttatgaaatggcatgaaaataaatccagaaaattaaactaagagctagacaaaatataaactactttgagctgtgcttttacaagacagatatgtctaggtatatgagctcctagttttcctggagcttacactctaatggtggaagacatgtaatataaccaataaccaaataactagaaaataaactttcaggtacagtgaagagccatgaggcaataaagcagtgttatgagtaatgatgaggggtgattgagaaagggtgatcaagaaataagaaagatcttattgagaagatggtggctgaggtcagttctgaattaggaagatgatgatataaagctttttgggaaaacaggacggagggaaagaacaggaagcataaactcctagagtggggatgatatttcttttctttccatttcttcttttatttcctctcctctcctcttcccttttcttttctttccttttctttcacttttgctttctttcctggagaacagaaagaaggtcaggattgacaagatgcagtaagagtcaaggggtaggtaggatatgtatagaaagtaggcaggggacagattatggattctaagtgcagtcaaaatggtggtagccattggacagtaagtggaattaattgatttctacttaagtcattttttttttttttttgagacggagtctccctctgtcacccaggctggagtgcagtggtgtggtctcggctcaccgcaacctctgcctcccaggttcaagcaattctcctgcctcagcctcctgagtagctgggattacaggtgtgcgccaccatgcctggctaactttttttgtatttttagtagagatggggtttcaccatattggccaggctggtctcaaactcctgaccttgtgatgcgtccgccttaacctcccaaagtgctggaattacaggcgtgcgccaccgcacccagccttaagtcattattctaattgcaatactgactgtggattactggggaaactagcagagatactatcagtaggatactgattgagattcaaatagcagagaatccaggtagcagttgcttaaatgagattaaaatgtcactttctttcatgtaataataagcaattcattgttgatatagtagatcctgacgtgatgaatgcgggctgtctcctgatttccattctgccatatctcaagggtagaaaaagcaggaaggaggaaagtaggaagaaagggcccttctgaaagatgcatattccactttcatatagcagtggtaagaaactagtcccacatctaagctggttttaagggaggtcatgagctcagttaaaaatcgagctgaggctgggcgcaatggctcacacctgtaatcccagcactttgggagactgaggcaggaggatagcttgaactcaggattcaagactagcctgggcaacagagtgagacccttgtctctacaaaaattttaaaaattagccgagtgtggttgtgcatgcctctgtaatcccagctgcttgggaagctgaggcaggaggatggctcgagcccaggaattcagggctggagtgagctatgatcacatcactgtactccagtctgagaaacagagcaaggccctgtttcaaaataaaaaaaaaaaatcaagctgatcttatagccatcatgccacatatgaggacaaggctggagataagaggaaataagctacatgtgatgaggggaaaggatgaaaataacattcttgtcttactaaatcacctgaaccctggaaacatctgttcttataaattcttgtcatgtgagataataaacactttataatcaatccattattatgaattgggtcttctgtaacttgtagccaataaaatttgatatgataaatctcaggtgaagcagggtgatgatgatgtagtatccaccttttctagttagtccttccatgtgatgagataaacactccactcttagggtacttagatatcagtgcctttgcaaaactggaggcatttttttttttttttagacggtgtctcgctctgtcacccaggctggagtgcagtggcgggatctcagctcaatgcaagctctgctcccccgggttcaacaattctcctgcctcagcctcccaagtagctgagattacaggtgtgtgccaccacacctggctaacttttgtagttttagtagagatggggtttcactatgttggccaggttggtcttgaactcctgacctcaggcgatccacccacctcgacttcccaaagtgctgagattacagctgtgagccaccagacctggccatgacatcattttgattcctcatatcctagggtgctgatagcagtcatgccttcatgtagcaaatagaaagctgaggggaaatctgtagaattcatattcaaatctgtgaaagtaaaacatcaagactaggggctgaattatatatttgcctaacatatgtagaaatcacagtggtgttcataggttggtggcatctccattttgactttgccttgaaagttctactgtatggcatcatggttaagtatttgggctgtggaatccaacagatgagggctttgattccaattctgcataataattcacatgtgacctaatctcgccgagatttagttcttcatataaaatatgaggattgataacactaccaatttcattgcatataataagattaacagtctattcatattgagggtttacaatatggcagacactgtttttagcaatttttaaatattaactttttaatccattcaagaaccttaagtggctggtaaaagtattgttattctccttgcataggtaaggaaactgagacaaaaatgagttgagtaacttgctcaaggtcactcagctagtaagcactaaagctaggatttgactccaggccatcaggccttagaatatgagctgcaggctttctccctgtttaaatgaaatattgcctgtagagtgtttggcacatacacatgcaataaatgtcacttattatttttattttgcattttcccatcactttattttgacttcaatgtgggagaggtgattatccaaagatgtgaattatccaaagattgtgatagtcagaagcagaggaaatattagatttttcttagtgggagtaggaataaagattcccagcacttgagccagtccaaagcaagaaacaaatgtccataagccttctttgctccacatctgtttttatttttcagtttatcagcctgctctttcatgacaggattttgcaatatttagctcccctggtgacttatagaatatcaaggcaagagagaataaagaaaagcttttagccaacttcagcttttccttccttaaaactgaagataagctctggctggacaccatgagattggctgaaaagaccaattcatgcatctccctgttatcagtcaagaggggaatgctggctttaccagtgcccagcactgttgatagtccttgtctcacagggtcaggatggtggtgtgtgaagataagacaagcttgtagccgaggactgcccagatagagcacggtttttctctactggagagcaggtgtgggcatctttggtagatgatatctgtgtcatcacatgaggttggggtttgacgagaacgtgaagaggagtgagtagaggtatagagatgttgggtttatctcctgcaaaaccaactgttctttcataagctacaagaaggaaatgacctccagtcctttgatttctcttaagaattcatataaaccatagcaaaagccaggccagtacatctaagtacatgtaagtcaagctctcattggagatgaacagcccattacatagaactgatgttacgtataacttttatgagtggttgtgaattgacaatactcctgtaaactgagaaagatcaagtattgtttaccatcttctggagaccaaaccagtgtctcctatactgaaaaaaccattggggtagaataagagctgactctagcaatggttctcctgaactacctctggagttcaaaaatacaattgtcttcctttgggcactctttcgtgtcaggagtccaagtagagattttaaagaatggaaaagatttaggtgtcttaaagaagtccacgcagccagtgatgggtaggaaagggactgggactgctaagaaacactatgtcacaagtgaggctggattttggcttgctttgttatgatgaagaggcaattagctggctaattctaaccttagaatacaagtgtacctattccaaatttgatattccaaatgtgaataaggtcaatttgaatacaaaatggtcaaaatacttgctcacttgtctccatttagtatgtaaataggaaaatgagagttcaaggaggttgacagtctaatgaggactttctgtcaccaggctggagtgcagtggcatgatcttggctcactgcaacctccacctcccgggttcaagcaattctcctccctcagtctcccgaatagctgggattacaggtgcccaccatgcctggctaatttttgtatttttagtagagatggggtttcaccatgttgatttagtacaatgagtaaaatgtagtttttcacaagaataagcattgaacgtcacaaaagtggctacttctaaatcaaccattcagatttgtttctacttcctattttaaagatgttcttattttatcacactatattagattcagtattccttgaatttcttcttcttttaaagctgttttttaaaacaaatattcttttaaaactgtacatttagaacctctaatgaatagcttcccttaaaaaaatgtagaatcatgtctggcatactgtttctctttcaattttgaaatgtcttaagatagcctcattttatcaccatttttgaggaatttttttttctagagttgcagggttttttgctttttatattcttttggcaatttaaagatgttattccattatctttttgctttcatagtgtcctttatagagcaaaacagtccactttatggttttttccttgaatgcaatgtgcttgttttgctccttcttttaagattgtatttttcagacatttcacaatgatgtgcctagatgttgttttgtactatattcagaattcattgagcttcttggatctttgagatgaagagtttaaagagtgttaggaaattctttaccaaagccaatttaaccagtgatggacacactaatagctctgacttcaccaagatacaatatatccatgcaacagaattatacttgtatcccatacatttatacaaataaaataacacttaaaaaatagctctctcttctttttctttttgtttcctttggatcttcaattacatgtgtgttatactgtttattattatcctatatgtctctcccacttggtactggtatttttgttttttgtttattttttattcttaatacatagattttctccctattttcacctttgatcattttctatttacccatttttaagttcactggtcctttctgtggctgtatgttgtctgttaagtttattctataatgtttaaggattacatttttcagttctggagttttcacttgatccttttaataaatgaatttcttttctctattggacatttccagccatcctttccttcattttgtatatattttttctctattttctttaatatacttgtgctagttatttaatgccttgctagtattagcaatgtctagctgagattgcaacgtctcagtcaatgtcaggcagcatctttccactgttttttttaaaacctttttctcatgctcttacagtataagatggaaatatctctacatcttttcagtccaactctaggcttgctctccgtatacgccataatgcaccaaagttccgtggtagagattcagtgggtaaaaagaagtagctttgatttcaagacttccaaagttctagcaggtcatggcggtctgcatggctgttgaaatatctattgttctttccttgatctagcagacatcctttgcctttgtcaggcccagtattctaccagtatttacccagatcttggacaatggtctcacgtgggtgagcagcttttgatctttgcttatcctggaagagatcttccagtaatatttagttccttcacatttctgtgcatgtacagatagaagacgcctgtaatttatattattattgttgttgttgttattattttggcaggagaaaagcttgtgtaattctctacaccagcagttgtcaaattactgcccgatcagggccaaatctagtctgtaacatatttgtttatagccagtaatctaaaaatagttttacatttttaaaggattgtaaaggcaagcaaaccactaaacaaagaatatgcaacagatgaaatatgtctcataaaccctaatatatttagtatccggtcctttacagaaaaggtttactggccccagtctatgtcttaattgaaatgctaacattctctgtttcattatttttcattctgaaattccctctgtctagcagctggaactatagattattgctataattttattttcttcattcttctattattcagcacttgtattttctactttctggttgctttcttcaattttgttgtctattgaagttttcactttgtaaccatatttttaattcacacaagatgtctttgctttctgaaaatttaaaataacaccacatttgtcttgcatacattccacatgttttctcgaaagaactgcccagctgacccacagaatcatgagtaaaatacaatgactgttctaaccaactgcattttgggtcatttgctgtgtagctgaatctgactgatgggaacctgttgccagaattctggaagcagagtagaaatctgggaatctaaacattcacgtcacaaacatgtaatcaatgtctgttttccacatgatgctctcattgctgactgttagcttttactgttgtttcctaggctagaggccatttggtttactctctccagcgaatgcatctccaatattcagctgaaatactgactccacaatctctaggctgtgcatactagcaagaggatctggttatcaaactatttcttccttttcaaatagtcaaccgattcccctgtggtaatatttcctttatcctcttctccagaatttcttttgtttccaatttcagatttgaggagaagttctgcaatgaacatgagattacttcatagcttttcccagtagcaaaccaaaattcagctttttttatcttgctaagtcatttatcattcctctatcttacgtttatgccctgacattctatctttattgtctactgacccattctctttattcttgtgggttttgttttttttctcctttattcccttaaattattatactgggacttctggaagacagtaatggcctgtgaatgtgttcttccatctttaatagacttagcttccatttttcacagtttcatccaaaggaaacttacatagatgaaaacatttggaatctgaaccaaccgaagccgtagcagggcagcaatagctgtgtgtgaatatttcttgtgcagacatttgtataggcagccctaagtgaactaagaaagctgtaaacaaaatgcaccctgacaaaacaataatgcaaaccacattttcatcaaaattaaatgacagtggtaattatgtatttctttgctatgttgatgttatcccaaattgtgagtgatagctaaaatgaagtcaaattaaatgttggcattcactcagaagcaatgtaaccatataaaacaaacattgatctactgtttctgccctaactgcccctctgtgatattaggcaagacacaactttctgaagctcacctaatggaaaaaaataaagtcttttatttcattaacttcaagggcaaccccagttttataaatttaccatttgtcaaaagaaaatgcaaacttgtttcatgtctgtcagtataaggaaattaccttccaactttgctaatagacactatgacctttatatctttgtaagtataaaaaatgattttgtgcatatatgaatcccctttagcagttaggtagaaaaagaaatgtgagtctgccaattacatcaactcaggcaaatcataagtgaaatcagtaaggatctcagagattcaaagtatccgtgattctaatcctataataatcctctgatggcaggatgatcaggtgtttttttaaaaaaaaaaatcgttacagttgaaatcattggatagtcttagcaaacaaatctacaaatcctactacatagcttttcatacgcaattctaaataagaaatgcctcattacattttgtccaactgagcaaagttgattggtagtagatttgcaaggttttgaaataagagaagagagggaggaaggaagtaatttaaggacatgatttctaatttgtaacgtccatttataatattctttggggtaatttgctgatgacagtacagcttaggagatagatcaagctaattcattaactgctgtatcttcttggagaggattacagatgggggagaaattggtctgtagaatttcaagtaccaagggatttcttcagactcagtctgcagacaaaactaacaaacccagatgatggatcatttggctaaatcttacttttctgtcccagtagggtaatcacagacaccatcccaggagcagaattttaaaaatgccttagtaataataataactacacacatgcattaatcacttgccatgtgttagttaattttataagtgttttagaggtttaacttcatttcatcacagcctatgagaaggttttattgctgccttacattttatgagaaaattgaggcacagagaagttaagtaatttgatcacacgttaggaggtaaagccatgattccaacctcatcaatctgacctcagaatgtgattatattttaatttattagcatattgtctagttaaatgctttgtttactgtattactattctttagagaaactgaaaattgtttgtcctctctaaaaacaagagttaatttctaaagccaagttacattattaaagggaaatagggaagtaaggtgacaaataaaaggggaactggagtataaatttaaaatattttaagacatatggattcttattactataacaatagttatgcaaaccatttttattttttttgtcagtttggcccacagtttaacctctttaaagcccactttgttcatctagattaatgaaataccatagcacctagtaagtgatcagtaaaattatggtgattgctttatctgtattaggattaaaacattctctcaatgtaattggatataacttatgaaaaatatgtgtgtgttactcttttgaaaatggctcttaaaatcttacaaagtattttggaggcatctatctttcttttatccccacttcaagggtgatatgtagagtagtagtggccgcagtgcttgagaacatcttagaaatgcagaaactcggccacacctcagaccaagcaaatcaggatctgctttccagcaaaatctccaactaaatcaaaagcactttgaaatttaaaaagcactggtttatagaactggataaataatgattaggataaagaagcacaggaatcccgtgacagttgtaggttttttagctcaatcagggactgaaagtgtaaagaggtagggggaaagagtttggtttcattttttatttttttggtgttttgtttttgtttttaagctaaaagaggccaaaaggctaaggaagaagagaaagcatgcaggaatgagacactttactaaagaaacccagttcctgagtttttttccgattcagaaaggaatgggatggaaagcaaaggtggatgtatcatcaatctaattttgcggaaaggaactgacttcttccaagagggaggaggaggggcacagagcaatgcattctggtgagtagtcgggcaggaagctgaagaggtgagtgagcaaacggcaagatacctggtgagagaaaggggaggagttttctcagagaaggtgatggaagtttggaggagttggtgtggaggacgggagggaaatgcaattgcagaaatacagatgggccaaagaaggtagtgagggctaggacatttgccacagtgcttctcagtcccgtggcatgtgaggcctgaaagaatgagtagccttcacataaaaggacaataaaagagaagtgatgttgctactattatgtaagttaaggaatggaaactgtgcatggtggctcgtgcctgtaatcccagcacttggggaggccaaagcaagaggatcacttggggctaggagtacaagacgagcctggtcaacaaagtgagatcttttctctatggaaataaataaataaatgggaaatgtaaaaagtagggcactctttctctagaattttgaagatgcagggcaattgtagatgatggaatgaggtttccaagggtgcagtgtaatggttagaaggtgcggcagccagggtgagtggggtagagatggagcctgctgaaagggattatgcacatgagaaaaagtaaacaactaaaggagagcagaaataatcaaaagcagagtgtgtcaggcttatgactcaaagcagtagccatgaaagttgttcggctgaatccccagatgctgcggagattctaattgttatctgcatttggtataaactaattttgagactaggaattggagcagaattctgaaaagagagggaaaaggtttgctttctgcaatgatacttttaagtctaaggtcaggaaagtgcgtcctaacatgttacacgaagtttttttttgtttttttgtttttttttttttgagacggagtctcactctgttgtctagtctggagtgcagtggtgcaatctccgctcactgcaacctccgcctcccgggttcatgcaactctcctgcctcggcctcctgagtagttgggatagttagacatctgtattctcattacagagaaacttgctcaattgactcctgctagccatccagtgtacgcagccttcctgaaaaacagtggtatttatgggaggttggcccttcttttttcaaagttctctttgttccctttttataatgaagcaagatgataatgatcactgggtcaaagtagaaaactaacaaacagaataggagaaatagatctgtggttaaatcctttttcttaataggaaaagagctggagggaagaagggaaggcagaaatcaaaatcaatagcaaaaaataaaaacaaacaaacaagtgagaatcaaaacgtctgtctcttaccaccatgatttttagaggcaactggcagaatacagcaagtgcagcaattcccctcttaccaaaaagatacatcatttcctataacttaagtttctatcatcaatcagagactaatttgctctcagatataaatttccaaccaaccagatttgagagaataggaaattgcccagttattggtcatcaagatctcatggtaactccttttgatcagattcctttcttcctaaactttaggtgaattgtaaatagataaattgtatgccagtacagtttctccacatttttcttaatactgagcactgtagaaaagggaattttaaaatggtcatttcaacaggcagggacatgtgtcaagcacagacccttacagaaacataaagatattttgaattttgaaaaacaatatgactgcatcgttagacagaatttaacatacataagggggcataaactcagagggcactatacaattagataaactggatgacaacaacatgtgacttgttatctggaagacaacagccccgttccctccaaattcttggttggcctctgttgagccagcctcattttagcatgcccgcacctcctgcttttaggagagtacttatttccagcgatgtttacaaaatggggcatacaagcattaattgtaaacaatgatttcagtcttcatctagcttaactgcaaaacatgaaaagactttcacgaaagtttttctccaactacggtttctgagaaggcttaaatgaagccaccacatgtgtaagcttatcaggttactgcttgccatctctaccaccatgggactgtgaatttctggtctttgtcctgccgattgagttctgttctctcaagagctactgtagctgaaaggtatttccacatgcttctgattctcctccctttatcacgttattcccagcatgactcagacactttgtgatacctccaagtgacaccatggaaaaggctgagagttttttattttacatgcattttattaattgtatattatcatatataatttataataaatatgcactatattaatatataaaatatacatgcattgtacatgtctatttcaattttttgaaaggttacataaatacatgcaaacgtgaacattttaaaggcaacaaataagtattcagtgaaaattatattttctttctgccaatgacttctagccccttgcttctgcacccaagatgcagtcacactattaccaagtttttgtgtaaacatccatggataatacgggcatatgctaaaattggtaatacatttcatttcctttttaacacaacttgaattttatacacactattcagtattttgcatttttcaccttatcgtggaagtcagtcagtttgtcttggtatgtacagagcctccttctttttgacagctgaaactgcatactatttcattcaatggagttaccatttatttataaatcccctattgctggatgttcaggttgtttcttagtcttttaaactcataagcaataatatatatacattctcgtacatatgtttccatgcacatctagtgtcaatagccaagtggaattctttaccaaaatatgtctatttaaatttttatagcttttgacaaattgtacttcataaaagtttatattccctgcaacatgtgagtatagttctgcatatagttctgcaccttctaacaaacactacactttctgatccttactaatttataagaaaataaaaatgtatagttttaattttgatttgggacactttcctctttgagttcaatttatctttaaatccatgggagctatctgttcctgtgccttggccatatttctactggatgattttgttttatttcagtgacttgtatgagtgagttttttaaattaagacaattagctctttccctcccataagtttgcaaaatatattgcctgtcatttgactgtgttcacatatttataatttttttgttcaggctcaacccaagggaggcaaaaagaagagaataatttacaactattattacaggggacactgtgggagaaccactgtctctaacattacacctctatttccagctctatgctgctgccatcttttgagagccaacaaaccctttcaccatgggagagccctatcatctcagactctcacttgccatagtgtttatctatatagacatatggcttaagtcttcattcagctgaattgcaaacaaacaaacaagagactcacttataccatgatgttctctaacaagagtcttcaagaatgtttaaataaatataccatatataatgttgattaagcccctgattatgaagacctgacctggaatgaaaccagagagaacagaaatgagagcaatattcataaataattgacaatacccagtgactgaccaggtaaacccacagggataacgtgaagagtcagggagggctccattgcggggctctgagataatgctgtggcagagctatttcttgcagagagttaaggctcacagtgagaaaggaagaaccacatttttttacataaaatttattttatgcttatttatgtggtcaattttgtgacagtttacttaaggcatatattgaaaaaacgactaaaagataaaccttttatctttaaaaggttagcctgaactgtagagacctattatattgcaaacatcatagtaaccatgtttcaatagtgttgagatctcttatctaattagatcacttcgtgaggccaagtgattgtgccttgatgatttgaaagccagataccattctgttgcctcagccaagtagtttgcaccagatgttgagacttgactgcacagagaaagtgacctaacaacagctgtggcaaacccatactttaccagtttcatgtgagatcttactagcttgggcccttctttatttctgtggaattgttgtgtggctggaagaaatgcctcctcagccatgctctgagaagcccatgatgttaacagagttgctagagaatgaatggaaagctaagaacagtaatccatatattttttcttttagaattttgacacagagcatttctaaaggcaatatgctattcactagcacatgcagcaaagcacctggtactgagccatttgccagtaaaaactaatgaatgatgagtggggatgaacacagtgatgaggagagagagaggcttgtctatgataggatctggctaatgagttggcactcatgaaatttcaatgaataactggagggttcaagtatttaccggttacccatcctcttcttgacctctgtaattaataagaaatatctcagaatctagtctacagtacatatgtttgttaaccacgagactccaaattggccattaatgtctaatagatggtgggcctaagtttgtctccatgcttatttactatggttaacaaatgtatttgcaagagaccataccagagtgaataagagtgtcagaatctattcaggaagcatctctccgccaggcgcagtggctcactcctgtaatcccagcactttgggaggccaaggagggcagattacgaggtcaggagatcgagaccatcctggcaaacacagtgaagccctgcctctactaaaaatacaaaaaattaagtggcacgtgcctgtagtcccagctactggggaggctgagacaggagaatcacttgaacccaggaggcggatgttgcagtaagccgagattgtgccactgcattccagcctgggcaacaaagtgagattccatctcaaaaaataaataaatataaataaattaaaaaaaaataaatataaataaattaaaagaaccatctctcagtcacctgtctcagttgattgatttaattataattatctgagtcttagctccaaagttagtccatttataaataatatcattttttgcaagctaactcattttattgcccttcaaaattgatgttcatagatttctcggtttagaaagaaaaagtaaactcctcatccatctaatcacttggctcctttagccatggtttcactatttaatattatccaaagacacatcacaaaattatctacttacgtatttcatctgacatggcgtctgcagctgtttattattaaattataaatgaaatcggagttatacctgtaaaaaatatggacaatattctctgttgagctcatctatccctaaaacccccaatccctcagtacataccatggaattcccattttactctgagtgccatgctccattaatccccagatctcaaagtgtatctgacaggagtgatgttgcacattataaaataagatttctcaaatgctgcccatctgttagtgatacaggcaatctaagtgtcctatacatagaacatacatacatttcctgcattgcatattctttcaaatatttgctcttggcattgctaggtgtcctactgtcataacagacaagtcattcattaagctgtcagcaccttgctaccctgctcccaaagaaggtccatttctgtgttttctgtttcttgctggatgacctattcactcatcataagctgagcagttactctcataacgggtgcaactgagttgttcacgtcaacatatgtaaaccaaagctctacttcttcatttcctgtggtccaacacttgacttgtggagggcactaatggattggaaagccagcctgcagtcatgagttaagttggtgtcaatgtgatacacttcttggctgagacatctaaggaagggacattaaaagcaaaaaagtggaacaaacaagtaacaaaaataaaatgattaattgtaaacactgtttgaaaatcttacagggaatcaagaaaggcaattagctacacagacctatacattgaaactatttggaacagagtatatgggaaattatgaaattatattaaaatttaaagcatctagtatagcacatatttgtaagatgaaaaataataaaaattaatttttagaaaattagagctaaaccgtatggatttttatctttgattttgttgtttatattttaagaggtcttgtgtttatgagaaatttagtattcagtagaaaagtagaaagataatcaattttaaactaattgaaagatcttaaaatatagtttcctaaacatcacatccaagcccttatctttcttcttgagcttttgcctaatccatgattatttttattctagggagtagaaaatgggaaaaagaaagagagagagaaagaaagaagaaagaaaggaaagattgatttaaattggccaatttggcttataagtaacaactttgatttgtataagtaacaacttcgatttgtgcttgacagaagattaaaatcattaactttggccaggtgtggtggttcatgcccctaatctcagcattttgggaggttgaggcagatggattgcttgaagccaggagtttgagaccagtctgggcaacgtagatgaattgataatctatatattccagttaaatatgaatcccatattatcaactctaatagagattaaaaggttgctgataaaatatggtaacagaaaaacactctctcaaccatctttctactgtataaatgcttggttttaacaaagaaaaccaaaataaagctggtgatgcatgatgttacataggatttattattctgaatatatattggcacaggactaggaaagatcacctcactaatcagttaagtcattgcatattttatgacatatactttatcctacttgcttcaagtttggttgtaaagaaagtgaaatgtcctagaggcgtggagacaaaaagctaatttatatcagggagagccatccaaatcccacaaacacaaatgaaaaaagtgagacactcaaagaaaatcatgttaattcatctaactagtattgcttttctgtagcacaatgcatgtagaatatcatgatccaggtaattttaaattacattttcttcttcatcctttccaaatgagaccattttattttttgagaaaaatgggacaaaatcattgttctattgtgttattttattatatattgcctcaatttgttaatgtatagaagcttagtttcacacagccattgaccaccaaaatgccaccccaccttgatttaaagatgtagtcatagcaatataagtgacaggccccaaatccccaaaaaaggaaccacagcaagtttttgctgtgtgtgtgtgtatgcatgtgtatatgtaaaaatattacgtatcagtcaggttaagttgcatttcttattttgtaatgaaatgtatatgcacctgatcatatatgttaatatacttatctattgattaaaatgctagtcagaaattctatatgtgggcagcatttggttgagctgagacctcggaatcattttctccgtacagatggtgttcaaattttctatcatatagctaatggtttctggagtttagataagaatatgaacagaggtaagaaaggcattaaaattgtttaagaaatgtttgttagtttcaaaatgaccatttaaataacaatgattaaaataatatatttgaaaaattacatgttcgtttgggatagaattaaaaaatcaaatgaggggtgaagaggaagagcggagaaagctagccacaaacttttatcagtctgtttggtttcagatcatccttacaaatgccaacagaatggagagggattgctatttctagaaaaaaagagactcagaaacaatctatggttgatcttgtctattatccaagtgatatttgatgtagcatttttctgttttattgaattcctgatatattatttatgtgttgtgggtttttatttttagatttatggtactattttaagtctgttagaattacacatactttttaacacgtgttatttctgatgtaaatcagttatttctgatgtaaagcgttaagttccaaacattgccttctacaatttgtctttctcacttccaataaattattctaaaactacctactcttagacataatttcatgataagtatggaattcagagattttttttcctccattttttttctataaagaaattcaagaccaaagaatcttaatgacacatggtaaattagtgccttctttagggaaggggtatctgttttctccatcatcaaatctccagtacccagcaaattacatagaacatggtaagtacccaaaaactatttgattagatgagtaaaaataggaagtgcaagagtttgaaacatttctacagctcaaaaattacccataaaaatttactttttgttctaagataaaatccacattgaaaattagttcttccgggagttgtagcctctctcaccagattccaaacagtaaccaacacaaataatacgaaggtttaaaagctttttggccagtcggtttctttggtctgtttgaccaaaccccataattacgtgagtacatggtatagatttcccaacacattccaatctcagatatctcccttattgttcccagaaatacacatatggtttccaaactatgtaaatgcattttttccagaaaatatgaatactgtcaaaaaaattttccatggcagaatataatctaaagtaaactttcaaagctgtgctgtatttcatggaaattgggataattcttggaaaatgtgataacactaagcaataataattaaagtagcaatgtagtaaaggtaattaatgagagtgaagtttcatataagagacaaactttaaatataattattataaaagagagagacaacgaattctatttgagaagagaaactttagatgtacataaagatggattaacaatttttctgtagaagtgagaaataatattagcaaatttaccccatgtaatagagacctgactgaagatgctcctagaatacagtctagtgagcatagttctcacctagaaaaagttctcacctagaaaatattcatgggatgaataaaataagtaagtggagttttccgaactccaaaactattttaatcattttcactaccagtaaatgtacacaattatatcctttaaaaaaataaaactgtttgttagatcctgtccaattctgtttcagaaaaactgtttgttagatcctgtccaattctgtttcagagatggagttctattaagctgctttatgtcagggagtttttataatgttgaaccaagtcacaaaaaagttaaaatttattttaccatcaggttacttttcactgatggtggtcatggtttcattggtggtgatggtattgtttttagtcaattttatatgtagttggttttataaatatgactaaaaaactctctgaatttggttggacttatcattccatcagcatttgtttgtctacatgaaaattagcgtgtttctaagagtcagaattaacaaatatatatccctcaataaatctatttttttcaggtttatcagtttgcaacaaggaaatactggtagccaggaccaccaaatatatttcttaataggcaagaatttatactttattattcatttaaatgcaaacattagaattaactttggctctaatttctttaagggttaagcaacttatgaacattttttgcagatgtatttccttctataaagttacctcttcctgtgtagtttaataagtacagagtcagcataaacagtattccaaagaaacttgtcaaagaacatttcataaaatacaactttttcataaataacagccagccacacacaaaaatgattcccatattagtgacggatttagaaactaaaaactgcaaaaattaaaaataaccattttagaatttttcttttcagacaggaagatatattttgtcacctcttgtttgaatcaacccccaactccccctgataaaaagggggaaaaaaccataattcagagacgtgcaaatatttaatattacttgtgctacaagagtcttatacctacgatatttaaaattcttaaacaaaaattcttaaacaaaaataatacccaactatcaccattgacatcttagagtttgttttcattagagggggtcacaagtcacttacccctaaaagaaaactccatgagagggtaacctgttttctggaaaccttagaattcttagtttaaaattctatgtgcttcttattcaataacatactatatttacttaagaaggagttattcctggataatgttcacatccacatttttaggttgaataaaaacaagagccaaataaacttgacaattaggtgaacaaagtttctggtttaaaaatggcctctgtctggaagccttggacaaagcctctcccgaactctcactaaaagaactatgtaagggcagaaaagatgtaaatttatgaccccatatactaagattgacagacaacccaaggcctgaatctggaaggaattttcaataattggaagtcagacagggctgagtgtattaaccaattggtgccctgtgtgcatgccatcctgtgacatagaacaaccttgacagaatgagagatgatagaaggccaccaaacctgatccacattcccctagcagagaagcaggacctgcttctgatcaaggatctctgtaggtgatgctcttccccctttcccctctttgatgccttcatcctgtatgttctagtatctgaaagtcccaaagcaatctgcataagagagaactagggcaagagagacctgcagtcgaggtgaaatgctgtagccttgactgtgtagacccaataacaaaactcccaagaagacacagcccaaggtgaatgggaattgatcataaaaagatgctgggacctctgcacagtatccagctcggcagtccccagcctttttggcaccagggaccaatttcatgggagacaatttctgcacgaaccagggatgggggatggtttcgtgatgattccagtgcattacatttattatgcactttttacttctataattgttacattgtactacagaatgaaataattatacaactcaccataatgtagaatcttttcctacaactagacggtcccatctatgggtgatgggagacagtgacagatcatcaggcgttagagtctcatgaggaacgcacaacctagatccctcacctgcgcagttcacagtggggtttgtgctcctgtgagaatctaatgtggctgctgatctgacaggaggcagagctcaggcagtaatgtgaccgatagggagggctgtaaatacagattaagcttcgctcgctcacccaccactcacctcctgctgtccagcctggttcccaaaacagactggtaccagtctgtggccctggggtttgggacccctgatctagttcttcagctgcagatctatctgaaaagtttgctcagtaaaaaaaaaaatggcaagccaaaggccaatctgctcaatgaaaacattgagtctggaaatattattgttcatttaaagattgatataataataatgacaataatcataataatagttactgaaaattactatgtgacaggtactatttttggtgcatatagttaattgttttaccttcataaaacatgatgaggtggttatgcttattcccatcttactgatgaggagactgagacaaagagaatttaagtcaaagtaatttgctgaaagtgacacaggtagtaagtgatgaaggtatgatttgaacacaggcagtataattctaattaaactctactcttggctgagagcagtggctcacggctgtaatccccgcactttggggggccaaggtgggcgaatcacgaggtcaggagttcgagaccagcctggccaacatggtgaaacccccgtctctactaaaagtacaaaaaattagctgggcgtggtggcgggcgcctgtaatcctggctactcaggaggtcgagtcaggagaattgcttgaacctgggaggcagaggttgcagtgagccgagattgcgtcactgtactccagcctgggcaacagtgacagactctgtctcaaaataaataaataaatactcttaaccaatattataaatgaacaaaaaaaactataaagaagtaataaagacaaagtgtaaatattgtgggataaaataaaagaaacatcatcctgaagatattagccggtgtacgtatcttaaaaagattataaaaaaggaaacatcatcctgaagatattaacaggtgtacatatcttaaaaagattataaaaaagaaaaataactggaaaacttttagcttcctgaagagaatccaagaagacatggccactgtgaaagaagagaaaacttaaaaagagagaatagcttggggtttaatgataagtggatgaggtaaataaagatgcaagtggtatagattattgcattggtgacacaagttaatgacctccctctagccacaacacccttggagatgtcactttgcagcccctcccaggaagaagtggaatctatttctccaacctggaattagagctggcctggagatgatacactttgaccaatgaaatgcttgaattagagccggcctggagatatgctttggccagtgaaatgctcgaattagagccggcctggagatatgctttggccaatgaaatgctcttaaacattatcacgccaattctgaaactaggcctcaagaagctgtgcttcgttttactctctctctctctctctctctctgtccgtctttccctaagactccttctgccatgagtataaactcaggtagtctgctggagaatgaggggccacatgagtagaaaatgagtggatctactgtgagggtatcctagacccgcaagcccccagtcagctggccaacttgcagcggcttcatgaatgagcccaggcaagatcggccaagcctggcccagaacagcaaaactgccctggctgacccatgggcacatgaaaagtaaacacttgtggttttatgctttgtgttttggagttgtttattactcagcaataagatggtaatgaaacatgtagctggaaagagaaaaggcgatatgcaccagaaatatcagttatttcctccatcaattatattttttcgtactctatgttacctttagaaaaaaatctgcccaaagttcttcatctgaccatctgcctcccgactgaagggacatcaggtcatgtggccctatctccccatagccacagctgtggggaccaagagtagaaatctggttccagctggaaccatcagaatttcatttatgagaatttaaaattagctcgcaaaggctctaatcagcatttgagagaagcgaaggctcttttgaggagattaaaaaaaaaaaaaaaacaatgaacaaaatgaagcagagaagagagtatataaggccccagaaacagaaatagagaaaattgattctttgtgccacaggttacttcctggggggcccatgagatacctgcgtccacattgttttctttttcctatcgtagtagaatatgttcccattttgcatgcctcggagggtcacctgctcattcttcaagacaagacaactcaataggatagaatggccatgttttcatttactgaaaccaaattttaacaaggatgtagaaatactataatatacaaaggatttttagcttttctaacctctattatcatagctcctttagttactttctttttaggaaaggcaagaagaaaaggtagattttcatgagaaaatttcaaaattagatctttcctcctcaattgttttaaatgtcaaatgtttacacatggagagtaaaatggagaacggatgcccttctctagaaaaatcaggcttccagtattaattaggaaatgatgtgaattccacttccattttaatttccatacagtggtttctgctgtgaagatcctaactctctttcttccagggtgctggactgttcttcccatcagataaagatgtccacagcaggaaccactagatagagatggagatgaagatgaaactcacgttatttcccggtattctctgcctgaatattctctgcagtggtgcaaagtgttaaataaagagatcttggagccattcctcctctgtgtgtgtgtgtgtgtgtgtgtgtgcgtgcacacatgctttatacagagaaaatgcagtgcagtattgaagagccttaggattcaaatcaaaatccaaagtaactacagagaaaacgcagtgttgaagagatttagtattcaaatcaaaatccactggaggattgtgtaagtctctacttcacttcgtcttaaattccaagtccgaagtggatttcctaaaagggttgtcagtttgcaatattttcttttctgtgccttttgaaaaatgatacatgtgactttcctgaatctgagtgagcataacagcagatgcaaagagattgagatggtgctacaaagctgccagaaagattttttcttttctttaacaaaaaagagaaaggggaccaaaaaaaaaaaaaaaagaaataatgcccccttgacagtttacattccttcttctttcctcctttgttatttatgttcactgacttgtccctggcctccacattgatcacctgttctcttttccattcctattcagaagcagaagctgccagtgctggtcccagaagtaacaacccagatcctgaaggcatctttcctggaagttttcctaaaagatgatccaaacacctaactaactatactgatttacaacagcaccaacaacatcaacaacaaacctaaggcccagaggtcagaactattacaaatataatgtcgtatccataaattcctaaatcttaatgcctcatgctgcacttatataatcgggggtggggggaaaggtggaaaatgatgaagaggaaaaacagtacacagatattcaactctgagttttctgggttaaggatgagaaataaacattaattgaaaactatgtgtgccatgataagggtttataattttgacatatggaggaggcaaaagtaggtagagtgagttggaaaactgagaccaaaatggacattatactgaagtactatatttcgctgtctgacatttgcaggtgcttagtaaatatttattttttctggtcaactgctttcctcatattcttcctttataatattctctagggaaagtagggcgaactcagactgagcatagataagcccacatttatagcctacttcttaatgtttctaaatctcatatccgtgggtttaatcataatatatattttatgaagttgttgaataaagctaatgcatgaaaagaaattggcacataaaaagcaatgaggaaaggctgctgtttcttagtaggaggaggaggaggaacaagaggaatgatagtagtagatgggctcagatgaaaatttcttagagcagcagagtgttaacaacacttgcagatttgggcaaaaacagtcacagtgaaatgatggaaaggattcaagaataagaagtgaatttgtgctagatatcaccttattaccttcactgtcctaaaactctataatcctacatatgtgaatgatatgttgaagtcaatcaatcaggaaattattttcattttcaaaattaatcagggccaattgtgtcactgatctagaatctcacagttaattttaaaaagtaatacttcaaaaagttaactaagccaggggtgggtggtggcttacgcctgtaatctcgacactttgggaggtgaggcgggcagattgctggagctcaggagtttgagaccaccctgggcaacatggcaaaattccttctctataaaaaatatggaaattagccaggcattgcaatgatgtacaccagtagtcccagctacttgggaggtattggtgggaggatggcttgagctcagtaggcagaagttgcagtaagccaagatcaagccactgcactccagcctggatgacagagccagaacctgtctcaaaaaaaaaaaaaaaaaaaaaaaaaaaacaacaactaaaaatggatcatagacataaatgtaaaatacactataaaactcctagaggttagcataggaaaaagcctagatgaccttagatatggtggtgacttcttagatacaacacaaaaggcacaacctatgaaagaaataattgataagcttgacttcattaaaattaaaacctcctcctctgcaaaagacaatgtcaagggaaggcaaagacaagccacagactgggaaaaaatatctgcaaaagacacatctgataaaggactgctattcgaagtatacaaagaattcttaccaactcaacaataataataaaaaaaaaaaactcaattaaaaactgggccaaaggtcttaacagacacttcaccaaggagatatacagatggcaaaaaaaagcatataaaaagatgttctacatcacatgtcatcaggaaaatgcaaattaaaacaacaaaaagacaccattacacatccattagaatgcctcaaacctacagtactgacaatacaaaatgcaggcaaagatatggagcaagaggaactcttattcattgtgatggcaatgcaaaatggcgcagccactttggaatagagtttggcagtttcttaaaaaattaaacatacttacccaataaaccagcaattatacctcttggtatttacccaataaccttggtatatacattattgtaaatgcatgtccacaagaaaatttgcacatgaatatttataacaacttcatttataattaattgccaaaaacttggaagcaaccaagatgtccttaatggataaacaaactgtggtacactcaggcaatggtatattattataattcagtgctataaagaaatgagttatcaatccatgaataaacatggaggaaccttaaatgcatattactatgtgaaagaagcctacactcactcaggataattcagactatatgacattctggagaaggcaaagctatgaagagagtaaaaagatcagtgtttgccagggcttaggatggaggaggtgataagtaggcaaagcacaaaggatttttagggcagggaaaatactttgcatggtaccataatgatggatacttgtcattatacatttattcaaattcatagaatgtacaacacccaaaattctccctaatgtaaaccatgaactttgggtaattatgatgtatcattgtaggttcaccaattgtaaccagtgttccactttggtgatggatattaataatgggggaggctatgcatatatgagggcaggggaatctctgtatcgtcccctcaattttgttctcaacctaaaactgctctaaaaatgcagtcttttaaaaaagtattcataatttcatacactttcagaggcgctttgaaggagaaaggtagagtgacagattgttatactcatgacctctaagaaatcccatcttcatgtacccagaacctttgtaatgtgacatagtatctgggttgtattttatcatccccttcactggctttgtgacttgctttaccccttataatgtggcagaagtcttgtgtgaatctcaacagattttgcaggtttgtcccttattgttttaaaaccctgaaaccaccataaggtgaaatttaagccaagcctaatagagaatggaaggttaactataggaaaaccaaggagctcctgctcatagccaaatgaaatagcaaaaactttgattgataccatgtcagaacctccagcttgagtgtagtcatcaaaagactgcagccacatgagtgatctcaggaagaaccagcagaagaacttcccacactgctaaggtacagaatcatgagaaataaaaaatcagtattgttttaagccactcagttttgaggtgatctcttatgcagcaaaaggtaactgaaacagaaattaatacctggaagtgggttgttgcctttaaaaaacctaaaccatttggcattatcttttagctcaggtggcaagtggagagtggaagagaagcagggagacttctactggaggcaagaaaagcagtgaggaaattattatcttaggctgcaggaaaggcaacctgtgtcctacaccagcagaataattcacatagttttatcctacattaaagcagaagatagaaaatacacctaatgaacttgtaaatcttaccaaggagaatatcaggctaaatgaagtgtcagttggctcctttaatattaaaaaaaaaaaaaaaaagctctaaaaaagaagttcggtttatatgtgtaatttagaagaaatagagaaatcccagggtattctctccagccagtaaaatactgtcaattaagaaatgcctaagaaaagattggctcaagggtatgtccataataccaattgtgaaaatctcagacaggtttaaggtggggctcactagaacctctcaggtagaaaaaggggcttctatttcaaggctatttcccaacagctcccaaatgtaaaatggcatgctttaggatgaatttggcatggctttatgtaatggagtggtacataatttcatacataggaaacccaccaagtttaagcgtgctgtattgttttagacttaagtgtagttcaaaatgagaagaggcgtctgggctgtcaactttctatggaaaggaagcaggctgagaggacagagccaagaataaagaagaagaatagattagagaatcgattccagggagaataattcagccttaatcaaaaactattccctgacttcggaaaaggagaattgttatcaaccatatcaacttgacagtgtttactatgcacctcctggttctgttttcagagtgggattgtctattgcagttacttgtctccatctcactgttgtaggttgagtgtgtggggcgtgtaatccacatctggacctgatttaggtgatgagatcccagactcagagcctgaatctggtgtggattagatgatatttgaaggggtcttgagaagcaggagtgagtgcattttacatgtgagagagtacgactccttgaggccagagatggcactgctgtagataatcatcaaaatgatcctcagtaaaccacagctcactgtttttataccccttcattaatttcctatgatgaggtggagtctattttactgactccttgaatctaaactggtcttgtgacttgttttaataaataaatgtggtagaagtaaagttataagagttctagagtccaggatttagctgatggaaccctgagatcacaagactgtgaagaatcccagtccagtctattggaagatgagaggtcacatagagaacaaccagagacccacaatggtagcaagtacaatcggacagctgattgagaccatcttggacactggagtgccagcatagctgtcacatgaccgcagcatcatgagcaacctcaaaggatgccaacaaaagatcgtctagattgtcaacaaatggaataatcaaaaattataaagtgctgttgctataatccactaaattttgggaagatttactatgcagcaaaagatttatgaaatgggtgggttacatgctgtattggctgctgggaaactaggtaaactcagcatatagcagatgcataaaaaatcagcaagttcacacattttagtttcaaacaatgcccatgatatccttgtaccccttaggtgtttaactagaaacacatttaatttttcaagtcatagttctttaaattttgggggttgaatattaacctgcagctcctcctcctctatacctctctctcttcctttttttgaaaatgtacataaccacgtacaatattctctgctgagggagagaaggaagcaaggcaagatcttaagtcaaattcatatgatgtgtcattgactatttgaagacttgggaaaaataaaatatatttatgaagggatactattgatacaattctaagcagatatctaatatttaaagaaatatgtttcagggacttcacagatactatattaactgatcagatgtaaatattatacttctgactttaatcaaggtccagaataaaataaaatttatactctcatcatttctctttctgtagaacacacagcctgagaaattatgttttattaaaatgtgacatttggttgaatattctttaatattcctaattttaaaaattctatgttcttaataatgagtcaaacaaaataaggtactatcaagatgcttttctaatagcctttgttttcactgtaatctgttttattaacttcccatttccataagcatttgctatgaaaaatattagcaagtaaaagcaataccataaagaaatacaatttatttgctgagaaagattaaaaggcatggtaaagatgtacagtattccttgggggaactgttttatttaataaggactcattctaattagcaaaaatcaatactagaaaataaaagatgtaattcatagactgaaattcaaactttatgtttgtttgtttatttttttttatttttttgagacggagtctcactctgttacccaggctggagtgtagtggcgtgatcttggctcactgcaagctccgcctcctgggttcaagtgattctcctgcctcagcctcccaagtagctgggactacaggtgcacgccaccacacccagctaattttttgtatttttagtagagatggtatttcaccatgttggccaggatggtctctatctcctgacctcatgatctgcccgccttggcctcccaaaatcctgggattacagacgggagccaccgcacctggcctttttttggggggtaggggggttgtcttatgtgataggcactgtgctaggtgctttcttttcttttcttttttatttcaatcgtttttgcgatacaggtggtgtttggttatgtggataagttcttcagtggagacttctgagattttggtgcacccatcacctgagcagtgtgcactgtacccaatgtgtagtcttttatccctcaccccctcccacccttcccctgagccccaaggtccactgtatcattcttaatgcctttgcatcttcataggttagttcccacttacttacataaaaaaaagttcaacatcactaattatcaggaaaacgccaagaatgactataatcaaaaaattaaaaaaaaaaatagatgttggcatggatgtggtaaaaagggaagacttttttactgctggtggaaatgtaaactagtacaaccactatagaaaacaatatgaagatttcttaaggaattaaaagtagatttaccatttgatcaagcaattccactactgggtatctagccagaggaaagtaagtcattatatgaaaaagacacttgcatacatatatttatagcagcacaattcacaattgcaaaaacctggaaccagcccaaattctcatcaatcaacaagtgaattttaaaaatgtgatatatacgtacacaccatggaatactactcagtcataaaaagaaactaaaaataggctggatgcaatggctcacacctgtaatcccagcactttgggaagctgaggcgggcggatcacttgaggtcaggagttcaacaccagcctgatcgacatggtgaaaacccatctctacttaaaaatacaaaaattagccaggtgtggttgtgggcgcctgtaatcccagctacttgggaggctgaggcaagagaatcacttgaaaccgggaggcggaggttgcaatgagccaagatctgtctcaaagaaaaaaaaaatcccactcccccagacatcctccatttagtatgaggatggagattattccagtatcttgtgtatagaaagatgtagaggaatccagttctgccaggccatttccaatgaataacaggcaaaacttcacatcatgtggtcaagagattgttcctcaaatatagtgagcaccaacattttaagcatgggttggacaaccatttgataagacgtgggaaggaggaggtggatgattatcctaggtttttttcatgttccttcaatctgaagagtctatattaaaataaatttaattgattgaaagcatacattatggtataaacttcactttatgcaccaaagatactaatcaattttgtaatagtgttcggcacaggtaggtaaaagtatttttagggacaactggatgaagcctgcagtgattctgccatgaaatatatgcaaaatatgccccatagaacaaaacttttttatggttatcctgaaaaatgtataagtgagccctagtagactattattaaaaagcaattggagaacatactgtgtttggtttttcattcctgagttacttcacttagaataatggtctccaactccattcaggttgctgcgaatgccattatttcatttctttctttcttttttttttttttttttttttgagacagagtttcactcttgtcacccaagctggagtgcaatggtacgatctcggctcggctcactgcaacctctgcctcctgggttcaagagattctcctgcctcagcctctgagtagctgggattacaggtgcccaccaccacgcctggctaatttttgtatttttaggtagatacagggtttcaccatgttggtgaattattgctaagaaagaaccacaaacaagtctatcataaaataaagaagaagaaagcagggttgtgacaaacttcatgaaggacgaggcaattcagttgaacgcaaagaatagtcaggattgtaacagacaaaatggggctgatgaatactccatctgtggagcacattttgagcaaaggtgctgaggtggaagaacacagagtaggttctgggaagaagaaatgacagtcccacgtgacatgtgtgtgctgtgtatgtggctagacaggctggaaggagcaggaagttggactggaggcagagtgccaggtcttgaggtctcactaagtagattggacttctcagcatgagaaaaacacaagactgtggcctgaggaagtgagtcagccttatttcgtcaatggagcatcaagtagtgaggtccaaaaacagttaaggatccagtatgtgcaattgtcaagttatcttaacgattttggactcaagataatttataatgtattatatgtacttgcccttgtgctattttagaaagcaaaatattctgaaataattattgcttgtttctcttaaaaaaggttgaactgtaatataaataatgctacaggttcagataactgtagcacacttttactcctgtacatatctattctatcccccaaattaagaagatatttacgtgaagttaaaaaaaaaaaaaaaactaatgaaatactttatgaccttaatggccaaccactgacttatttgatttttttttaagtgagctgccttaatttacttgctgcttagagctaatcactattatttcttattaaaaattgaccaaatataatttaacatactccagtttgtctacccctctttcttatcatcaagtagtatactatttgcagatgctactagtaattgatttgatatttaaaaataagcagactaaaccaaagcacttgatctcattacctacactggaaaattaaacatgaaggttagatttatcagtaaaggagacactctcattaggctgtgatattgtgatacaaccaaacattagtttgaccttagaaattgtcatgattataataaaacatggcacatatcccctgtgtgaccagtggcttattatctaataaataatttaatctaacatgtatatattcagataccaccatgaacaggccttccattgtccattatgacattgtgtgctagaatgcaatattcctttaaaacctccaaaataaaagaagcaaataccagcttgaggccagacaagaagcctgtgaaacatcagacagttttcatcacagctggccaggcctgggcagtttcagacaaaggacttccgcctttatctggcccttattttgatgtctcattcagctgaagataaaaggaaagatgtgctttgaaatgtaaccattagggcggcaaagaaatcaacatgcaaatgtcacccatacatgaatttgagatgaagtctacatttgtcactgcaaacttagagcttgttggtattttttcctcccaaagcagtaagattttaaaaagcaaataaaaacaactgtaaatagatgagtgctgaatttagttcaactggaattctttaactacttatgcattttgttcacaataagcacagagaactaacatatacatgttaaggttacatggaaagactgaaaagagatgaaataaaaataatgagaagtggagaatgatattatgatacattaggtttaggcaagtaacagaaggatcgagagactccacattggtggtttcaaatattttatcaatttctatcatgaaaatgagctaatttcttgggaaaactaacgtacattttcaaagaaggttgcacaactacctgaggtgatagtgacctgagagagatggacaagttataattttaattttacagataacctaaaataaaaatttacaaactatgaaatattaattgggttcatttacaaaattcaaatagttgcaaatgcgtcttttgtatatggattctcattctcctggttcagaagaaattttctaaatttgtgacttcaaatagttagtttgtgtgaatttgtcagagttttaagtttggttctgtatttttaccattaaaaattccgaggaaaataacttgtcactccccccaactctgaacatacaaatccataagagaattacagggttgattaagagcctggaaaggatctgaagatgttcattctggaatttaagatttgacactgggcaagaccaaaatagttgtgttaaaataattggagggctcttataaagaagatgaactttatgtgatctgtgcaggtatctaagagagaaggacgaatactatgttaactaaagagaagaaaattttttaataatttaactgagtcaaaaattgaatagtacactttacaagtatggcatctagaaggtcaccatcatgcatttatttgggttgtgaactctggaacagaattggggaatataaagataagtaagatataatctttgcctaaagatttaaaatttttaggaaggcaaagagaattaaaggtaaagtatatgaaatctacatttaaaaaatgaatttagacacagatcttgttccttttatacaaattaactcaaaacatatcatgggcctaaatgtaaaatgccacactataaaactcctggaagataacttaggtgaaaaactagatgaccttggctatggcaatgacattttagatatgacaccaaaggcagaatccatgagagaaataattgataagggggactccattaaaattaaaaactcctcctttgcaaaagacaatgtcaagagaatgagaagacaatccgcaaactgggagaaaatatttgaaaagacatatctgacaaaggactgctatccaaaatatacaaacaactctaaaaacccaacagtaagaaacgaaccgatgaaaaaatgggtcaaaaattttaacagatatttcaccaaagaagctacacagatgacaaaaagcatatgaaaaggtgctctacgtcatatgtcatcagaaaaatgaaaattaaaacaacaatttgataccactacgtaactattaatggttaacactgacaacactaaatacttatgaggatgtggagcaacaggggctctcattcattgctggtgggaatgaaaattgtgtagccattttggcaaacagtttgacagtttccttcctccttccctccctcccttccttccttccctcccagggtctcactctattgcccaggctggagtgcagtggcataattatggctcacggcagccttgactttcagggctcaagctatcctcctatctcagcctcccaagcagttgtaactacaggcacatgtcaccacagcaggctattttatttttatttttagtatagatggcatttcactatgttgcccatgctggtcttaaactcctgggttcaagtgatcctcttgcctcggctttccaaagtgctgtgattatgggcatgagccactgtgccctgccagtttggcacttccttacaaaactgaacatactcttactatatgatccggcaagtgtacttcttggtatttactcaaaggagttgaaaacgtatggtcacacaaaaacttgtgcatgtatgtttatagcagccttattcataatttccaaaacatgtaagcaaccaaaatatccttcagtaaataagtagataaataagctgtggacaattaaatgttattcagcactaaaaagacatgagttatcaaaccataaggacatagaggaaccttaaatatgtattattacatgaaggaagcaagtctaagaaggctacatattgtataattcagactatgtggcattctggaaaagaagaaactatggagacagtgaaaagatcagtggttgccagaggttgggtggtggtgatgaacaggtgaagcaggaggatttagggggcagtgaaaatacttgcacaataggataatggtagatatatgttatcatacatttttccaaatccatagaatatacaacaccaatagtgaatcctactttaaacagtgaactttgagtgactatggtgtgccaatttaggctcatcacttgtaacccgtgtaccactctggtgaagaatgttgataatggggataatacaagctgcacatgtagaggacagtggtatatgagaaatctctgtaccttcctcctctcaatttcgctgttaacctaaaactgctctaaaaaataaaatcatctaaaaaacatggtacattatgattggaaatttagaagagatcaaaggtgacacgtttgggtgtttcctcttgagctgagtatttgttggagagtaagatgtcctggaatacttacagaatagataatacttaaattgaaatttgaagaaaaagtaggacatagccagagttgacagaatgtcttaagagtatttgagaagcaatttagttgttagttcaggtattaagctaaataatgtttaaatccaatccatctgtgaactaaatgattttcaatgtcaattcaaattcatgatttaaaaattttgagtttacactacatagaaaaattaattcaaaataaattcatgacttaaatgtaagactaaaaagcataaaacttgtagaagaaaacataaaagggaaaagcttcatacattggatttagtaatgatatattggatatgacagcaaaagcatgtgcaacagaaggaaacagatcaactggactacataaaaactgtaaaattccgtgcattaaaggacacaatcaacagaattgaaaggcaacacatagaatgggaaaactattggcagggcgcagtggttcacgcctgtaatcccagcactttgggaggccgaggagggcggatcacgaggtcaggagattgagaccatcctggctaacacagtgaaaccccatctctattaaaaacacaaaaattagccaggtgtggtggcaggcgtctgtagtcccagttactcaggaggctgaggcaggagaatggcatgaacctgggaggcagagcttgcagtgagccgagatcgcgccactgcactccagcctgggcgacagagcgaggactccatctcaaaaaaaaagaaaaaaaaaaagaatgggaaaactatttacaaatgatatacctgataagggattaatatccagaatatataaagaacccctatgaatccacatcagcaaataactgaattaataaacggacaaaggatttgcataaacatttctccaaagaagacatacagatggccaatgtgcccatgaaaagatgctcaacatcactaatcactaaggaaatgcaaatcaaaaccacaatgggatatcatctcacactcattaggatgtctactataaagtaaaacacaaaataacaagtgttggagaggatgcagaaatatcagaaatcttgtgactgttggtgggaacgtaaaatggtgcagctactataaaaaacagaatggtggttcctcaaatattaataatgaaattaccaatataatccagcaattccacttctgggtgtatgcccaaaagaattgaaagcaagtactcaaacagagaaaagatagaagcaactcagtatccaacaacagatggatggataaacaaaatgtggtatatacatacaatggagtattattcacccttcaagaagaagttaattctgacacaaactataacatggatgaacctttaggggtctatgctaactgaaataagccagctgcaaaaggacagactccacttaaattaggtacttaaaatagtcacattcatagggacagaaagtagaatggtggttgccagcagaagaggaattgtcctagagcaggcacagagtttcagttttgcaggatgaaagggctctgtggatgaagagtggtcatggtagcccaacaatgtgaatgtacttaaggccaatgtgcacttaaaaatggttaacatggggcaggcgccatcgctcacgcctgtaatcccaacactttgggaggctgaggcaggcagatcacaaggttaagagatcgagaccatcctggccaacatggtgaaacccaaactctactaaaaatacaaaaattagccaggtgtggtggtgcacacctgtagtcccagctactcgggaggctgaggcaggagaaccttttgaacccaagaggcagaggttgcaacaagccgagattgtgtgactgcactccagcctggggacagagcgggactccatctcaaaaaaaaaaaaaggttaacatggtaaattttatgttacatgtactatacaccttaattttaaaagttttgagaaattgtctttaaaatagaataaattaggacatttttatttgaaatatttttagaagttatgttgttgatttgttttactatttcaatagaataggttagaaaaaaagtattgataagtcaggtgtaagccttccatcgggtaatctgcagctacaatgaacaatgagaggttttatatcctttatatattattttccacttagttaacttccctaactacattgtggacatgcaatttatagtagctattacattcctatgtccttaaaattatttcaaagtagattgggaggaaaaggggtcatctttatgtacatattccacctgaggcatcagattccaacaagataatctagagcaagcttgtccaacccatagccctcaggctgcatggggtccaggatagctttgaatgcagcccaacacaaatttgtaaactttcttaaaacattatgagattttttgctatatacatatatatcgcaatacatatatatcatgatatatatatatcacaatatataaatatatatttatgttaattatatagattgtgtgtgtgtgtgtgtgtgtgtgtgtatgtatatatatatatatatatatatatatatatatatatatatatatatatatatcacatcagctattgttagtgatagtatattttatgtgtggcccaagacaattcttcttcccatgtggcccagggaagccaaaagattggacacccctgaaggatgtgaaacagattcctacacgttttgagcagaagccagcaatggattgctctctcggaataagcatctatagctagctcatgaatctgtctcaagtatatgctgtattttccagggaccatcatcacttcatttcatgctgtgaaatgaatgaggttggggtggccaatcagttacattgaagtaatggccatatttgaaacaaatctcaacagatcaaaaacatattttcacaaattagatcatttatatgccttgaaagtttattacaaacatgcctatgggtgctataatagcaggttcatcatctaaaacattgtatttcttaaaaaatccactctcataacacatttatattttaatgctaaaaaaaattctaaccagtaaagatttgaaatcacccattaaaacaattgatataaatgttctttctaaattgtaacttgggaaaacattatagtgtttactgttgcaacatactggcttggaaaggattttcctccccgcaaaggtttgccaaataaaatacaaatataacatgcaatgtaccacaaaaaatgttgttcgtctgaaattcaaatttaactggatgtcctgtatttttatttgctaaatatagccctctcacacaatagccagaaaatgaaggcttcacaatttggacattttacttactgctctccagaaagacacagagggagaattagttatctctaacacttactacatttgatcctagttttcagggacattttcttcaatatcatcttgaaaactgctaaagttatttaggaccctgaaatcttggatggggtctgtgtttttcaccatcgctcacaagcacataccctagcattcctgcacagcagatgctcaataaatagatgttgattcaataattatataaaaccaaagcactgggattattaatgctcataaattatatcaacttcagctttgtgcctagttgatgattctgttctctgagttactagtagactcagccacttaattgttaatgtcactattatgcaagttcaacctaaatctacaaaggccttgggacaataggataaaaacaagattctacctctatcaaaatatggatgagttggctaattgaatttcatttttgtgtaatgtaaaagtgatatcatttccataagccaggtgacaatggagatgtctgcctaaaacatggggcctttttcactcacgaaaaaagtgtactagaggctagaggcagctttttcattattcactttaataaaggcaataagaaatataatattgcaaatacttattttcattatttgactattatgattaataacacaaataatttttattataaaagattgatttatttgagcactaagtgccaataactctgctaagtactctgcacaccttactttatttgtgcatacattttttctatgtgttataagagtgttttttaaaatataactgtgttagtccattttcatactgctatgaagaaatatcctagactgggtgatttataaagaaaaacaggtttaatgcactcacagttccacatggctgaggaggcctcacaatcatggtggaaggagaaggaggagcaaagacatgtcttgcatggcacaggcaagagagcatgtgccagggaactgccctttaggaagccatcagatctcgtgagacttatccactatcatgagaacagcatgggaaaaactacccccatgattcaattacttcccaccaggtccctcccacaacacatggagattatgggagctacgattcaaggtgagatttgggtggggacatagcgaaaccatatcaatgacacagctctaatccatgttggtttgaaaaaatgaataaatacatgtgtttctttccaatgagtaaagtagaaactctaaacttcttactagtctgatagaccaccctaggactacatcatagctttaggtgaaaacagtacttaataaggtcaaaaatcctttttgggaaatgaataatttgtataagtttgaatgctttgggatttggtagaaaaatctagttatgtctgacaaagacaataataaaaaactaataggtacgtttcagtttttctgcaatgaaagccttattatagtaatcttaatatacatgaaacttcaagcctaggacaagaagaaaattagtttagagaataataatatctctcttgaagttagtgatgtaaggaataaacatttagttatctttttagaagtgcaagtgcaatttttattgcctatttgctagtcacatattcaacaatgtacaagtgaaatactgaatgtaatagctaaggagaacttgttagtcaatggctagctgattataattggatgaaattacactgttaattttcaagtcatctaagtgtgaaatggacagagggaacagtagaaaaatgatatcaagcattgagatatcctgggcaaataatacctgtattttggtacataatgtgaagtctaggttgccaacttaaatggtgaaaaatatctcattgaataagcatgatggcttaggacttatacaacttatttcaatctaagaaattacaataaaaaatgagtaagttagtttgtttaggattatgtcttcacaacagcacagcttgacattctcagcattgaacattattattctgaagttctacgtagaacactctctaagtaaatgttcagagtttgcttctttaacacaaatgccttctccaatctgaaaattatacagctttaatttacaggcaaaactgaatctaaataaaaaacttgcaacccaatttttaaaatcagaaacatatatgattctgaagatggtgatgggtgtttcttcagttgttatggcagagatggctctgtagtccgtggtgcagagttgctatggagaacaactgttcaaccaagaactacttttttcatctccctctgcatcttgatagggtcaagtgactagttctaccaaagatatggaagcaaaagtgaagtaggtcaaaatattttggctaaagtttaaaaagggggtgtgcattctttatgttctctttctctaccttgcagctgggtgttgactgctgatgcacaaaataactttgtaaaccatgttttgaaaataatagaccctctctcatgaatgactgggaacaaagctactactcaaatagaaccctatccctctccactgctgatatagtttagatatgtatccacacccaaatctcatgctgaattgtaatccccaatgttggtgggaggtggtgggtcatgggggtgcgttatcatgaatggtttagcaccatccccttggtgctgttctcatgacagtgagtgagttctcaggagatctggttgtttaaaagtgtgtggcacctcccccctctctcttgctcttgctcttgctcctgctcctgcacctgcagtgtgagatacttattccccctttgccttgcaccacgattggaagcttcctgaggcctcctccggaagccaaagccactatgcttcctgtacagcctgcagaatcatgagccagttaaagcacttctattcataaattacccagtctcaggtatttctttatagcaatacaagaacaaactaatgcagaaaatcgttatcaaggagtggggcattgctctaaagatacttgaaaatgtggaaacaactttggaattgggtaacaggtagagtttggaagagtgtggagggctcaggggaagactggaagatgggggaatgtttagaacttcttggagactagttacatggttgtgatcaaaatcaagtgacagtgaagtctgggctgacaaggtctcagatgaaaatgaggaacttattgggaactggagtaaaggtcacttttgttattcattagcaaagaaattggctgcattatgtccatgtcctagggatctatgaaggtttgaactgagagtgatgacctagggtatttggtagaagaaatttctaagctgcagtattcaagattttgcctggctgcttctaaaaacctacaatcagatgcaagatcaaaggaatgacttgaagttggagcttatattttaaagggaagcagagcataaaagtttagaaaatttgtagcctggccatgtgggagagaaagaaaaagcttttttgagagaggaaatcaagcagtctgctgagaaactgtttcctagagaaatctgcataatcaaaaaaggaggcaagtgatgatagccaaaacaatagggaaagggccttgaaggcaattcatagagcttcccagtagcccctctcatcacaggcctggaggcctaggaggaaagaatagcttcctgcacaaggcccagggcccactgctctgcacagccccaggacactgttccttgcatcccagctgctccagctccagctccagccctggctcaaaggggccaaggtactgctcaggccactgcttcagagggtgcaagccataagccttggtggcttgcacatggtgttaagcctgtgggtgcacacagtgcaagagttgaggattcagagtctccacctagatttcaaagcatctagaaaagcctgagtgtccaagcagaaacctgctacaggtgaggagacctcatggaaagcctttactagggtagtaaagaggggaaatttggggttggcgaccccacacagagtccccactggggcactgcctagtggagctgtgataggagggccactatcctccagactaaggaatggtagatccactgacaatttgcaccctgtgcctggaaaatcaacagagactcaactccagcccatgagagcagctttgggagccaaacgctgcaaagccacagggaaagagctgctcaaggccttgggagaccaccccttacactagtgtgccctggacatgggacatgaagttaaagaaggctattttggagctttaagatttaactacttccctgctggattttgaacttggctggggcctgtagcttctttcttttggccaatttctgcctttgggaatgaaaatgattacccaatacctaactccattgcatcttggaagagactaacttgttttatattttacaggctcataggtaaaagggacttgtcttatttcagatgacactttggactctggactattgagttaatgctagaaggagttaaaactttgggggactattgggaaggcatgattgtattttgaaatgtgagaaagacatgagatttgggaggggtgggggtggaataatagagtttggatatttttcgcctcccaaatctcatgttgaatggtagttcccatgttggaggagaggccttgtgggaggtggttggatcatagggctggattcatataaatagtttagcaccatcccttgggtgctgttctcatgatagtgagtgggttctcagaagatctggttgtttaaaagtgtgtggcacctcccctctgtctcttgctcttgcttctgctcctgccatgtgagacccttactcctcctttgccttccaccatgatttgaattttcctgaggcctccccagaagcagaagccatgatgcttcctgtagagcctgaagagccatgattcaattaaaacccttttctttataaattgtccagtctcagttatttctttatagcaatgcaagaacggactaatacagctgctgtttagacttcacgtgagcaagcattcaacttctgtgctatgacagtaagcaactagcattcatttaattcagtcttacttacccttacatctaatcaaaattttgttaattctgtctctttgatatgtactaaatctgcaattattttctttattagtgcactagtagcactgtagcctaagccaccatcatttaaacacagatagagatggggatctcttgtgaatctccttgctttccatttgtgttgtctttggcccattctaaataacgcatccacagtaacctttaaaactgagactcaggccatttcacttttctgtttgaagatgttcaaaggctttattgtactatttaaaaaaaaaaagaaggtcttaccttggtctaaaaagtttgaatggcttgtctttgcttgcctttctaatctgtaccaccccatttcctcactcctcccccgtcaagctctgtctctgttctcactgctttgttgctcaaacagatcaaatattttcattccaagtgaatgctcacttgtttcttcatctctttgaactccaaatgctaaattccaagatcttataggtagctcatttttaccctccttagaaaagctgtctcttattctatctttagctggccttactcatttggtctctattgaattattttatttgtgtcatttatagttttgcacaatctgtgattgtcttatttgttgctgacttgatgtttggtttccccacataaaatataaatactacaaaggaagaggcaatgtctactatatttgttgatatattcccagcagcaggcagagtctgcacataaacaaatgaccaatgctgtattagtcagggttctccagagagacagaactcatagacaattcagaggtcttcccaacagcccctctcatcacaggcctggaggcctaggagggaagaatggtttcttggcccaggcccagggcccactgctctgcacagccctaggacactgctccttgcatcccagctgctccagctccagctccagccctggctcaaaggacccaaagtacagctcaggtcactgcttatatattatcttcctaatatatgtttattagggataattggctcaccacacaattataaggcaaagtcccatgatagaccatctgcaagctggggaagaaagcgggtagtgcctcagtctgagtccaaaagcctcaaaccagggaagctgacagtgcagacttcagcctgtgattgaagggttgagagcccccagcaagccactggtgcaagtctcagagtccaaaggtcaaagaacctggattctggtgtccaagggcaggaggaatggaaggaagcacccagcatgggagaaagaaggaagctagaagactcagcaagcaaggctatcccaccttcttctgcctgctttgttctagctatgctggcagccaattcgatggtggtcacccacattgagggtggatcttcctctcccagtccactaactcacataccaatggcaacatcctcacagacacattcagaaaaaatactttaccagctatctaggcattcttcaatccaatcaagataaaacctaataataatcatcacaaatacctattttttaaataattgttgaatgactattattcttgtttgatttttcctgtatcaataagaaatcaattcaattctgattactgataagcagataaaagtcatattttattgtatctccttgattaagatttcagaatcctacatctcaggattatttcaaactataaagattaccttgtctaaacacattgagatctctcttataattccttttttaaagagtacatgcttagtctcatgaagcatagcacaccaatccgttgtgtaataaacactcaataattgtagaattaacaccaatgacacttcattttatcatcatttaggcacaatgtttggaccagcccaggatccctcactcacaagaacttctatcggacttagcttatccctcagaagaccctggacaccaccaaaggtcatcagcacaatcttgatggatgtctaagaattgaagattgatttttgcctaatgacaataaagtcatcactaagttaaatatctataaattaaatatctattaaatatgtattaaatatatagtaaatatttaattgaatattaaatgcatgtatattctgagctttattgtgtttttcatgaagacactgtcaaagactagagccccatatgttaaaaaagtgagtgagtaatcttattataagcatcataatatggtcccttttcttcatcctgctatacataacaatctgttatacaatctccattattctactaatgaagcctcttcaaatcataactttgagaaacattaccctcacgtaacaattttttttttttctttgagatacagtctgtcgcccaggctggaatgcagtgatatgatcgcggctcacttcaatctctgcctcccaggttcaagcgattctcctgtctcagcctccccagtcgctgggactacaggtgtgcgccaccaagcctggctaattattgtattttcaagagacagggtttcaccatattggtcagactggtctgaaactgctgacctcaggtgatccgcccacctcggcctcccaaagtgctgggattacaggtgcgagccaccatgcctggccctaacttagcaatttttgaagaaatctcagcagccttaattcaaaatctatgtaaattgtgtgtgtgtgtgtgtgtgaaaaagctaccaaatgattcttttggagatgaggaattgacagcgagcttaggaaaaagtcagtttttgttgttgttgttgtttttaatcaggagtcttcctaagttgagatgctgacattcatggccacttattgtctggttgtaattcaaatccaatgtccagattctacccattaaagaaggtaataactggaaataacttcattaatatcatgttccagtatctgcgggctctggttgtatgggagaaggctgtctaccattttgctatgaattctaataacctatgccagatatatagtcatggggtaacccccattataaagcttctagtctacaaaaccaagagaaagcttgtcaaaataaatcttaacttctgaccacggtagaagacctactacggggtattaacagtcagaactgccaatcactgcctggtctaaatgtttgtattaaaaattccaactctggtggcatgaactttggataaaatcatcataagctgtgtgagtccaaaaaatataaacccagaatgaaatatatttggggctaaaatgacgttactaatgtctgagatgggtctccctctccccctttgaaacgtgatgcttttattagattatttctactgccaaaagacacagctactgtctggctacattttctggttttctcttgaattaaaacaaataaataaaagaaaaatgtctacatcttttaaacaaagcaaatgggaatatttttattatttttttttcctgccaactgaacaagttctatacatttagataggtctctggttcacataatatgatatgtacttgtatgtgcacacagaatgtataagataaaatgggctccttaaaataagcaagtattgcctaaggatatatagacaaatggaaaacagcacttcgctatgttacaagggttggcatggtgctggaattgactgggagctgcataattttcaactttgctatctacaggctcctgttccacctctatgatttttttgcttcatcatttacctttctgatccttgataacagtcattgtttctcagagcacaatgagaatttggatcacattgctcattctcctcattttacagataaggaaagtgaagcttccagaaattaaatcatcatcatgtacataaagtcaacatacataattacaactaattagtggccaaccacatgctaggaacctccatatttacatattcagcagtatgtgccagaggcatcctcagcactttactgacctaactgcagggtccttggcggtcatctttgttttccatttaaataaaactagggggaaagacattttccatgcaggggcaaatcgcctctcaataattctgcagattcttagggaaagcagaggagtggggagtgggtggtccttacatttttgcctattgcctctgagtttgcctttgctaatttcctgaaatttattgaaatttgccttttatattagtcccattctctttactctgcatcagttcctacatactgtttatgtaggatcgttattttcgatgttgtatcatttttttagatttgtataaaaatgactagcatttggggtttgccatgtgccaagtactctaataggcacttaataaaagttttgtctttcaaatctgtctttgtgagcaggatgcggtgactcaccctgtaatctcagcactttgggaggccgaggcaggaagactgcttcagcctaggagttcaagactagcgtgggtgacatggtgggaccccatctctacaaacaatagaaaaattagccagacgtggtggcacacacctgtaacctcagctactcctgggctgggaggatcgcttgagtctgggagttcgagattacagtgagctatgatagcaccactgcactccattctgggcaacagaatgagacactgtctctaaaaaaataaagtaaaatatgtctatgtgattaggtgactgctctgatgacagagctgaaatataaacctgtgcctaatcaattccaaaatctgttctctctccactaagctatgttgctgcctgtatgctattagttttataaagtggggttcttcataagacagaaattatatcatttgcccatctctgtaaggcatgatctctcaactgtgggatgtatcagggttcactggcattaatctccatccctcttatggccaagcagaactgtctcctcagattcaagatacattctgtgtcctagaataaattcctttctctgaggaaagtgaactactttctaaagagataaatgaatgcaggctgtggttttattggcatagctttttagaggtttttgtttttgtttggtttggttggttacctgcattataccaagtatccccaaagacatttctaagcacttagttaccttacaaataagactgattttaatgggaatggtcatgttgaacttagaattgcctggaataaggaagggtttgcagtttattcaatttcccatctcatctcaggtcttccatttggggataatgtttgaatatcatttggtatgggtggaaccagcactaatggtagattccattatggctagacacatgcatgctaacataggtttgatttgagtcagaccacagagcaaaacctaaagcaatgatcatctgccaaccctcaacccactgagggatttgttggctgactaacactgtcctgctatggtctgggagagaatgggactaactattcccaataatccacttcacagaccaaaacctttcagtagactttctctctctttttctttctttctttctttctttctttctttctttctttctttctttctttctttctttctctctctctctctctttctttctttcttctttctttctttccttctttctttctccttccttccttctttctttctttttctttctttctttttctttcttgctttctttctctttctttcttgcttgcttgctttttccttccttccttccttttcttcctgtcttccttttctccttccctctttttcttccttttcctctttgtctctttctcaccctgtttttttctctccctctctccctcacccctcctttctgtctctctctcacacaggcacacaagaactcgggtttattacaatatttaatacattctagttggcttaaagcacttatgaattacatgtttattttgtcttcttgactgatatttcctcatgtctgagtattgtgcctctaggaaggaaaacttatattttttaaaggagagcttttctctaaatattgccaaaaataaagtggcttgaaagaaaatcacatagaccttttccttcagaaaagagaataatgtttgaagacttttatttgtaagaattcctatttttaagcaatatcttcgaggaagcagtaaggcctgaatttgaataagatcagagaagacacattcaaatgatagtgcctagtgtgtatgcagtaatggtgaattcttctgtatttacttctggccttacaggtataattattctaccagtctttcgcaataattttctcgtatctactgtaatttgaaatatgaattacaaataatcattctgaacagagatgtctacttacagccatgtcttctgtaccccttcattttctgtctgtcatgttctactactgacaggtgcaaagtgtaccacagtgacttccatgcctcctggccacggtatgcaagagtcaccaacctagcatgcccatcactgccttggatttgttcctggtcaactctcttcacctcctgatccttgtctgaatgctttcctccctgccaaaagaattcactctatcctctctcgtgcatatctcaattctagtttatcactgtggtagaattatttgcttataggtctgtgtgctttacaaagtgtaacttgagatgagaaaatgtcatctttacattatcggccaccaaccagctcagtgcctgacagtgggaaggtgctcaaagaatatgtgtggtttgcccactaaattccgtgatcttaaacttgtcttgcattaaataacctttgactgtcaagtccaaacacaaaacccatagtcattttctatagacatttgcagaaaggatttctcctcttctaaattaaaaaccaccttaaattataaaaatgtttgtataaaattctgcatctcccatacaagtatttgcagagcacagaactttgcaaatagtgagcattggataaatggaagactacgagggtgcttgttctaggttatttgcctcatggcaaatgataatttggacttaatatgtggtacacattgttctaagaattttgtaacattaactcatttaatcctcacaacttgaaaaaaattttctatgagaaaaaattctcgtagttgtgagggttaaatgagttaatacttaacaggtgaggagacagagaaaatacattacccaggattgtgcaaggtgctaccagaatttccagagactgtgagtttaaccacaactctcagaaacattggtcaatagaatatcacatgtaagatgaaatgctgcaagaaagagttctatttacgaggctggatgggagaagatacgacaggaaacatggcagtaattttatggtacatcacaccttacgtgaccacagttcaaatgtcaaatgcttcttttcatgcttttagctctttcaatgagacctggtttactcacatttgctcacccttcaataaaatgtgtatgttcagcacatcctgctattggtaagtttgcttttccaaataaaaatgtattttgagggccgggagcggtggctcacacctgtaatcccagcactttgggaggccgaggagggcggatcacctgaggtcaggagatagagaccagcctggctaacatggtgacaccctgtctctactaaaaatacaaaaaaaaataaaaaataaaaaattagccagtcatggtggcacatgcctgtagtgccagctacttggaggtggaggcaggagaactgcttgaaccagggaggcggaggttgcagtaagccaagactgcaccactgcactccatcctgggcggcagagtgagactccatctaaaaaaaaaacaagaaacaaaacaaaacaaaaaaagacgtatttttggtgagaacttacttgtttttcactctcttgaaaatatggtgaaaatggattgaattgggttgtgtgtcatcgtaacaatagaacattttatggaataaaatatttgattcttactttaaaaacttttcaagaattcttaaaactaaatttacctatatgtagctagtacaccattttatttacaactactttttatctacctatctaagcacatctagcagtgttcctacttggtaacactctcagctccttgttcctattatgttcctaaaagaaataaaaagtcatactttggaaatagcttatgattcagattcccacagttacttctccttctctaaccccacacttgagtaatttaacctaattctttttcagaatttcgtctgttttcggtgtttagttatttttcgaaaattatcaaatccagaggaaactatttccagaagtttataagtaatcataaatatgagtgaaatattgttgaagtctgtcttctatgagcactttggaaaatgttagtttttcttttacattaacatttttgttagattagacattgtggattgaacttgattccaggcaatgggactattaaatggcatgggaaataaatctctgaaaaggatcagaaatttgggtcctgaaaatgttagtaccatgaattgaatacttatgattaccttgaactgtatataggatatatcctttctccttggtgacaaaaactatttgtttttacttgtatgttttacttctaattgcttttagcaattgtttgatagaacaatcacagctagaaaaatatttcatcattggcagatgaatgcctttttaatatgaaagttttctgaagctcttcaggagagatttgcatctttctactttaacagaaaatctatctttaagcataggaataataaattgtgagtaatcagatgtgcatgttttatcaacattctttaccttttatgataatgaagaagaatagaattcattgggataaatttccctatttcctttaggcctgattacagtcaaaaatttctgcttcaagctttaaccgtgtcatttaatagagaatacaatgaccctcgtgttcaatgtcgagtgcagaacatctagaaaatcagtttaaaaatttagtaaagactgactgctggaacgtcagtacttcccaaagcagtcaggaaaaaccccaatctacgtcagaccctgatacttattagaacatgacatgaatgtggtcacttttgcttgtttactgttgaaatgcagtttactaaaatttgaaattactaaatgtttcttacctggctagttatagaggttaaaaggaaaatagaacctgaaaataaaagacaagaggaacatggagaaaacaaattaaaagagcagaagtatgtaaacaacacgttaagtccgcctgtctctacattctcttattaagtagtgaattttttgttctctagattcaggagggggcttggatgatgcaaataagatctgctcggtagaaccaaatgaaaaacagacaaaataatgtaactactcagctcacatatcaactgtcagggaatctgggactatatcaacctagtaggagagggaatctctcagtttcttaaatctatgtagattcaataaagtgccttttcactctgaaaatatgtggaaagcaaaacttaccattctcaaatgaatggaagaattgattgactgatatgttagcccctagactgatgtatcttagatggtggaagaattgattgattgatgtattagcccctagaaagaggtttaagatgacactatgccttcatcaatactgtgatatggccgtctgaaagctaatgtgatttaggcttttactagaaggatattattcagaggtaagacaagtaattgcttatatctattctggattggttaagtcacaccaagactttgtttcaaaactacttctatcagatagaagaataaactctcagagagagagagagagagagagagagagagagagagagagcaaccacttagttccctgtgtatgagatgacagtgatatgtagctaagagagccaaacagaagcaaagacatgaaagtataagcagagtatggacatgctactatgcaaaagagactttaggtttatttctttctggtttttgtttgttgattgtttgtttgttttgagacagggcctcaatgtcaccaaggttagagtgcagtggatcgatcatagctcactgcagcctccatctcttgggctcaagcaatcctcctgcctcagcctgccgagtagctgggactatacaggtgcgtaccaccatgcccagctaattattattattttagtttttagtagagataaggtctcgctatgtagcccaggctggccttgaactcctgagctcaagtgatcctcctgcctcggcctcccaaagtactgagatgacaggcattagtcactgtgcccagccatagatttatttcttaccaattgttaaactaatgcagaaaatttgtagcctgagtacattttaatttaatagaaaatttttctaatagatggaatggggacttctagcggtaaaaaaaaaaaagtttctagttgttattcaagcactgcttagaaagtaaaatgatgtttatgttatcatgaggacttaaagactggatagaaagttgagccaataataataataacaacaataaaaatagccattatttactaagaacattttgattacctattggatacaatgttcaatatttgaataatgggtacattagaagcccagtcaccaccagtatgcaatatacccatgtaacaaacatgcacatgtaccctctgaatctaaaataaaatgaatctccttttttaaaaaaattaggttttgaaaatgtgataaaaaaccacatattttgtgttagatcttgtggtaactatacatcattgccaacccttagaagaatttcacaaagtttgtgttactcatcctgtctcacagatgagaacatagaaggtccagaactctgcatggcttcccaatccgttgcaaaatagtaaacagagacggaaccactatccaaatctaaatctttatgtctgcaacatttccatttttaccctctatagtctttgatactgacaaattctgacctataaacagtattttttccacaaacatgtcagaaatgctgtatcctctcagcaaggctgaacataactgtttaattaagctctgggcagactgtggaaggcctattccgcattgcagctcaccatgtctgttcctcggtccagcctctgtttttctcatattggcatttttttttttccagacagagtcttgccctgtcacccaggctggagtacagtggtgcgatctcagctcactacaacctccacctcctgggttcaagtaattctcctgcctcagcctcccaagtagctgggactacaggtgcgtgttaccacacccggctgatttttgtaattttagtagagttggggtttcgctatgttggccaggctggtctcaaactcttggcctcaggtgatcctctcacctcagcctcccaaagggctgggattactggtgtgagccatcatgcccggcccatactggctttttatttctggcccatccacactttgggggtttggcttatctaagcttctatccaattgctttgttttcacatcagaaattgttttctttctctatgttagtatagttgacttactgttaatatggcttatttttcctccttgactttgagataatctttttggtagcacccactctgggaagggtcatgtatttttgggaccagccccttgtctgactcaaatcctgaaaaattgtggactgccaaaaatatttatatctctttggaatttctgtagttatgaatacaacaaagcagcaagttatgtagtctcttctacagcatttctagttttctcttatttcctgtgtatatgtcatctccttaataaaaatacaaattatttagaggaaaaaattatttgtaggctcatttattattcaaagattgggcttacagtggaacttctttaaaaatagtcttttgtatttttagtagagacagggtttcaccatattggccaggctggtctcgaactcctgacttcatgatccacctgcctcggcctcccaagtagtcccagctagtcaggaggctggggcaggagaatcgcttgaacccaggaggcagaggttgcagtgagctgagatcgcgccactgcgctctggcctgggcgacagagcaagactctgtctcaaaataaataaataaataaaaattaaaaataaaaagtcttttgacctgtctttttcatctgatcagggtttatatttgatacaaataacattctatgtttatcacatcaatctagatttttatggaaatactttcagctgaacttgattttctcccaagaaaatccaatatagattgacatttatgtggttgattgtattaggataagtgactagttctatattttctcataatgaaaaatgaattcatctgtaagcaagagccttcttaagtctttgttaccaaaaattcagcaaatacacaaaattgaaaagggcacaaaacgaaaatcaccaagcacataagactaggaaaaatgaaaataacaaacacaaattattgagaattcattatgtgtcagatcctaatgacccactgcatgtatctttcaggatcagctttctaacatatctgtaccaacctttacccaatacccattagtctatgatgtttaacattcagaaaaagcctccaacttttaggaagatttctgcttatagtattacataacttttttctatagaatcaaatcaaactacaactttatttttatggattcttactttcttcccccttctagtctattaaaatgcttagaaaagtacaaatagtccatttacacacaagtacagacataccatgaagaataaaaccaaatatatatttgtgtgctgatgtgtttttatcataccctaggattggtagaagtgatgccaacctttctgaaatgttgcttcattttggatacaaggcattcttattaatattggagggatgtgtctttgtcacttggatacaccatccacggctcatgcaggcttaaaatggatgtggaaaaaaacacgacattgagagtgatcccaaattcgcccttgacttcagatcacttacatgttcttcaagtagaaatattgctgaaagtttgccaaagacgaaaagcccgtggctttcaccattttgcaagcaaaggaaacagcatttgaacctcctttgaaaacttttttttttttcacattaagaggctccacacgaacagaacgtgccataaatagtgtgtgctaacattttccaaaaactggacatcaattaatgctaatttatgaggaaacttctttggaagagcatagtccagactcataactactgaaaagactcattaatataaacgttaagggagttttttcaaagggaggaattaaggtaaatgcatatcattacagtgaaagctcataatttattgaaaattcagtggaaaggaaactttatgctgtgtgtttccaaagtaatgttttggcacattaatcaaggaaataaaataaggatgaggatgtgatctcaagagagatggtcagtaaaaattcagcttagtgatagctaacatttattaaataagtattatgtgccaggcattagaaacactatcttgtttatttttgcctaacaatgctataaagtagattttcttattatttccatgttgcagtggagaaaagagaaaatcaagcagcctatgttatttgctgtagatcacaaaactaaaaagtggtgaaattcggattcagaatcacctttcttaaccacatgtgctacgacattatactgcctttaacaactgtcagataggtatatgcacaactctaggtgggttcatgcaatgccttattcttcagactgtctaataataaaaacaaatcattttaatccataagttctactatacatttaaatacacaaattaattatttggccaattttaagtttgaggaaattcattattcctacttttaggtcttaaacatggtaaaaaaaaaaaagtaattagtagatccttaccttttgtgaatctctctaacattttgtgaggcccagataatattcacacattggctggaaaatgaaatttctgtttcttgagatacttgatcatcttatgtaaaatctttacttaaatgaaagtggggaatgggcaagttatctttttttttaggggtaggtaagtgtgtgtgtgtttgtgcgtgtgtgtgtgcatgcatgcgcttatgggagtgtgttttggcagaggaaatacgggatgcagacaagggaaagggaaagcaagaagaatatttctcccagaatctgagactggttaacttttgtctattctatctctagtagatctatttgactttaatgtaaatgttttccctccaacctgtcatagacctgtaattggacagaggattctagcaggatgttgacactcatcatctcagtgcttgatgaaatggatccatccttctagagcagtgcttttcaaacttgaacatgcttctggatcatctggagggcctggtaaagcaaagactaccaagcctcatccccagtttccatttcagtagatctccaggggagcctgtcagtttgcatttctaggaagttcccaagtgatgatattgatggtggtctggggaccgcacctggagaaccaccgaagtggagaggcccactatcaatgaaatgtacatataggctcatactgtactttggcggtaacaattggtactcagtaaaataaatggtgccgtttgtcgtgagaatgacagataaaacatgttttacatagtttctaaatgatctagaaataatagtggcattcagttgtcagaaataaaaaattaatattgggcagggtgcagtggctcaagcctgtaatcccagcattttgggaggctgaggcagattgcttgagcccaggagttcaagaccagcctgggtaacatggtgaaactgtctcttcaaaaatatataaaatttagccgggcatgttggtgtgcacctgcagtcccagctactccagaagctgagggggtgagtggggagaatcatctgagcctggggaggttgaagctcccgtgagccatgatcgtgccactgcactacagcgtgggcgacagagtgagaccctgtctcaaaacagtaataataatgaatagtaatttaaagctattattgaatcacttcagactttctaaatctttccatagctgccagcaacctaatcgggcactcaatgtaattttggattaaaaagagagaaaggaatcaactctcaagccattcatttctgaattctccacaggaattacaagcttccaatttgtttacattgaagccagaaatcgtactagaaactgattacactcggcacaaaaaattaaagcaggagttatatctgaatgattaaatattacaacttatcactgagaaaatactgatgtgatactaggataaacaaagaacattcagcaaagaaatagaaggagaaaaacgaatttaagaggaataagggatgtcatttttaaattgtgaaagtagaaatcgtgtctatctttattttcaatataattcatttgtagaaaaacctctcttcatgaatctattcagtgataggtggttgttggcaaaattaagtctgaaatactgccaaagtttacctaacactggttcctaaaaagaaataccatatccgtgttcctgattctaatagaaacatttgtgtatcagtcatgtaaagtcctctataactgaagaaaggagtatgagtttaacatgcaaaattcactgcatgaaactgtgcgaaatgtttcaattatttctataataacatttaacaggttccagatatagtgcattaagcacacagccaagaaatgtcccaagcatatgctgttttacattttggtgtattataagtgtatgaaacacatgttaggaatatatttcatattctgcatttgtaaaatatcaaatttgtatcagcagaaaccgcaaaggcagcacagaagctgcccccagagcacagccattttgcaatcaaacttttgacaccacattatcattttaaagaacaaagctcctggttgaaatgaagaaaataatttccacaactcgcagcaattttctttatgtatttattacatgggattcaaaacacatactccacaaaaattactctcaagtttctattttgtaatctgtgccactctcaaagtacacattaaaaacaaaatgaatttaacttgatcgctcttatttcattttataccactgaggtctcatttttttgtcattcttgcagtttatttcactatatctacatgctattgttcctcagattattctatgctatgaagctctcaagagagaaaattcctcttccaatgatctctatatgtgtgtttgcaatatcattctactttggtattataattttatgtataagatgaaatgctgataaggcattttatgagaaacttaattatgctacagaatttaccatctattactaaatattaagccttttccccatatcttacttcctaaaattgtatatgatattacatttatactctaagactcttttgttataatgatagatgatgttggtttgggtagcatctgcataacttgtcttctgttgaattattttccaatactaaacactgttgtgatgggttctgccagcctatggtcaaatgtacaaatcctaggttacacattccctttcttggcctgaaaaatcttggtgagtttaggatacatccgaaagaagctggattccaaatagtgcccaaaatataaatttaaaactcaaactacactggcctctttcgtgctatttacagtcactggtctcagaggaggcaggggctcaaaagatcctcactgtagaagctttctttggtttctcccttctttgaaatcctgtagctttaaaacatctttagaatttgttttgtcacttaccaaacaatgcattgctgtttttagttttattaaattataggtgtgtgtgtacttattagtagagtgaatgcctaatattttcttaaggataattatgaaatattattatctcttcatgaaagtagctaacattaattttttagtctaggaacttcacaatgtctacatcatcttttttcgtcatcctcactttctaaatcacatattttattatcatcctgttctgtctgaggcataatatgctaaggctgcgcagctgagatttgaactcccttagggagtaatgaacattgtattggctatgcccttatttaactctagtacacacagagctcttattcgcgacatgtatatttttgcattaatgtttagcccagcacccggcatctagcaatcctcttgttggtgagttaaatagaattatacaagataaattttagagtttagtagagtacatcaacaggtataattttatgtttcaatttttggaaagtattatatcctgccttagcttctctatacataaaattataagctaatgttgaaacaaaactccacctaggcccctaggctaagcccaaagtctactttatccctttaagaacatctacagtttgccttgtttttgagccctacttggattcctcggtggcttcccagaacccttaggagtatccatcctcactacagtgtgcaaggccctctgtggccttgcttggcccttttggaagacaacaccactctcttttttgttcacaccatttactcttagaacatgcctcaccaatatttttctaacttcttctctgtggcctctatcttattattccctccatccagaatggtgtttctttggctcctctttgcttgcttggagcactcaccattaaaccctatttaaaggccattgcttctgagagacctcctctgaacactctatcgccctagcttctctcctctctcatgctggctagactcatggtttcttatctcaggccattcccaacctcacacctattgcaactagtaaactccttctgcgtttacttgcttatatacttctttccttctagattagggtcaggaaactgcaacctgtaggcgccattcaaccagctgattgcttttagacattaagttttattagaacacagctatgccccatttggttccacactacctagggaggttgtcctactttaacagcagagttaggagtagtaacagagaccctctggccaaaaaagccaaaatatttcctagttggccctttatgggaaatatttgccatcccctagatcataaactccaaaagagcaagggttaagttaacacagtattttggttaataggacaacccttgagccagagtgcctgggatcaaattccagctccactaattatgtactgtgtgatactgcccaagttatttaacatctctctgttcgccaggttttttcatctgtctaatagagagatgatggtaatacatacctcaccaatttattgtgaggatttaatgaattaattaatacctgtaatgtattgacagtagcttacagcacaaaacactatataggtgataacaaatattatcatgtattgatgtttttcgtgattgactaaaataaatatttaatagacgaagaggcaattaaataacaagttaaatgacaaagcttcttctttgaatcctcttctttgtttggacctctctaataagatatactctattccatattctgttaaaaacgtttcttctcctaataggtttcccctaaattatctgcagctggtaagtgtgtcccatttacatttgtatacctgaaatgacaaggaccacgcttataacaaaggatatctctactacgagcataggtgaatgaattactgtcaacagaagagccccaagatatgtaagagactttgcctatccatcattaattattttaacttgtttttattacatatttctagagaaactaggctgtggatgacattgtgccatacgtaatacaaaaatgcaccatcattccttactttaagaaaattataaattaatagggaataaaaaatagtacaaaattcttacacatggatagtatctaacccacatacgagtattaaatgaaatgctaagacattccaggggaggaagactttattcccagcatcacacagagccgaaaagggctgcatgaaattttgtaaacagcgatttccctttagcatgaccttccagcaaacaaagtgcttgactgtatttttctcagtggattacttaaattgatcgtgctttgttttactatgaattaagcttgtggctatttctacccagattcactaagccacctgtgaattcgatcaaactgatgaagtggatcaaacaatattcaccggctgttttggattcttgtaggcatagctcagatctgtttgttgactttttggctataaattaggaggccaagaaattagtgacgctgcttcgcctcgccagtacattggcatttaataaagtgttcccaattatcaataagcaagtctccatgttccatggcaaacactcacctcaggaaagagtggagagccaggagcaaccaaccaaatgctacatctcccatgaagaatggctcgatcgttttgaatgtcacgatcagttaaaatacctaatcaagtgggcttgcgtagacccggcattggctaatatgacctactcgtgtgtgtgtgtgtgtgcatgcgtgtgcatttccactatattttcccacttctttttacttggtaaaaatggcttgacccaaacgtgaatgtacctggcaagacgtgttatatttcacaaatttctaatcagagtggaggatccaggagtgccatgccagcttgggccagaggcatcctgcaattaacattgtcaagcgctcctgagtgtaaacagttacctcacattacctcagagctcagagcatgaggccgtgtttgcacaggagagccagccaccacagcgtggcttagctaaaattctaacttctggaagtcattttctaccacgtgcatgcttcaataaatctgcaaaataacttaagcaaagagacccagagtgatttttcttctttcttttttctccccactcgtgctcaactaagctgtaaaactaagtcccctttatcacaaaagtctccactttataatccaattgactttcagggtttgctttcccacatgtttgtctcttcctgtgccactaaatcgtatcagctgctctggatttggggttgatggtgattgctgaggtgggagagaccgcggctgcatttattggctactttctcacaagacatagggatcagaaatgacagtttttggcattactgtagtttgctagatatataacttatttagttagtttttacttttaatttggtatttggtgatttgttcaaagatatagatcttgagatctgaacattattgtcctttttgtttcatactatacagaatataaaaatatagcccaaattactgagtatctgtgtaggtattgaaaacagagtgttgtctaaattaaatggtttgtatgtcaacggttttttggataatggtaaatcttttagaatcacataaatgttttacacatatatttgtgtgtgtgtgtcacctttaatagaaccaacatatgggatgatatggtcaacctgaggttttaagtgtattctgtagaaagagtgacaattcagtcttttagtaaggctttgattcagttttcccagaatgacctttccctctcaccccagtcctcttctgttgtgtgttgtatagatcaggcctactggaataaatcttcaggaatctggattatatagtcttggctctgagggctaactagctgtgtgattcacgttgaacttttctgggcctcactatctttcagtaaaatagagaatatcttacttatcttactccttcataactttctttaggcctaggaataataaaatagtatatttcctatattttcaaaatgttagtaatattatacataaacaaatatggctaatgttatggaaattacaatttagtgatcattattgttttcctcttttatgtttttttcttagtaattatttctccttctctctttcctaatgtatttctgacaattcatactctctctccataccagaggttggcaatattttttaataataagatagacagtaaaaattttcagctttgcaagctatactgtctctgatgctactactcaattctgttgtggtggtatgaaaacatccatagataatagtaaacaaatgagtgtggctgggttccaataaaactttattcaaggacactgagatttgaatttcatgtatgtttcatgttgtacaatattattcttgttttgatactttttcacctatttaaaaatatagagaaaaacatatatggaggagaccattcttagctttcggtcttacaaaaacaggtggttgcaggctatatgtggcctgagggtcataatttgccaattcctgctctaagctgagacctaagctggctgccatgtacaaatgggaagttcagctcttggtttagaagaaatgcgctagtcagagagcaagaaagaggtcatctcaattcccaggttttacctccaatttaaattccaaaaaaattaatgaatgtcttataatcaataatatatatttcccacaaaccactagacttcaggcaatggaggtacagactgctgattttagacactcaccttttacatttgactcaccatgataagtctggtggcactaatgctataatgttttagagtgaaaaggtaagctggaggtcatgtaaatcatctctctcactttatacgtaagataacaatttgcttacaattaaaatggcagagccagactagaactcatatgacccaagaaggggttcttttcactacacaacaatagtttcactgtaattgttcctggaaactcatccaaaagaaacaagcaaaaaagaaccaaagaaacaaactcttggacccttcaataattctaggttaagatgttggcccaggtaataagaggtatttgaataaacaccattggcctgctgagtagccccagtttttaggtagttttagagcaagcggtgttgaccagccaccaaatttgactgctgtctgcttataacatacatacttttcatggtctactaaacatctttagcttattatcttcagaaagcttgccccagcagatctggcactatgagagttttttgtttgtctgttttttggaggtttttttgtttgtttctttggccagaagattcatccataataaattttccaatcaaacctgggaccaggtctctccaagagttcacaacttcaccattacctagggccacatttaaaatcctgcagtttaccattctcatgcaaacagacaccagaatggaaaggtagtgcatatattatccacatctgtctgctacaaatcctgcttagtttcatgcttttaggacaaattccaggcaaagggccactgggagaggctccattcctctgtaccccatgcccaactctgtcagttaggcagcagaataatttctttcataaggtctgtcctagccaaagaaaacatacccatgccctgtggcatgagacctctaaagggaagggactgtgttctgaattacactccaaggggagctgacctgagatcggatgccttaagacctggaaagcagtgagacaggaatatatcaaagatggactttatcatttggtatggttggaaaatcaattttctatatgtaaccatgggacggataaaatccacctctcatactccagctctcctttcccccatggtataaattagaggactgcattcatttttgggtatcaacactaaagaaacaagcatctcaaagttggagccaatcatttaaaaggatagaaaaacaaaagttttaaaggaagaaatggagagatgtcatttacatgaacagattcaattagccaaaaaatataggaccattcaagcttcctgctttgcttccttgtgcatctaatggaaaaagtgttcctgatccaggattttattattattgttattatttgaaatgccaccttagaaaaaaatttccatttgatacccaccttactaggagaggctcagtacaaaaataaatagttgaaaatgtgctgtgactgaaatagtgttagccaaattaatgctaaatttccatctggacttcagcatgctaccacctagaaatattttctggatctcatttctatctagcctttcttttccttttttcttttataaaagatcactccatttggtgatttgctggaataggattaagtaattgttgaaaggtggattgctatgtctttagtgtctttaggctgatctcccatctccagggggttgatgattctactggaaggaaaacctccaatggtggtcttttccctcagttggctgctggtcatcttagcagatttattcttagactataaggaatcaatgaaggcagggcacttgacagcgggacgcctttgcatctcttcatggtgcctcacacatagttttgtttctataacttttaatgagtaaatgaatgtgggaccaaatacagccttaaatagaaaggctaggctaagcaggtagtgaaattgcagaatacttattgtatcttaaaatatgcttaacattgacagttccaaaaagcctcggtacattgaaacatttatacccacagttcaaacatctttggaatgaattaaactcttgttactgggggaccagggacaaaaacagatgagaaatcccaaaggctaaggccattttcaagtttagttactaactcactctatgaccttgtgaaattcgtgcaactctttgggtctctagttctttatttttagaaaaatcgagagtaataatagcggtcctgccaatttctccattatatttaagcagattcttgaatagttgtaaatggcctttggaagcataaaaatgtcccataatcacaacacctctttttgccagaaagatgagcacaagtcatttagtaacttaaagagattgtcacttgaaaagtccaactaaaatgttttaggcatctctatgtgctaggcactgtggtgggcacttcattaatattgtcttgaaccctcacaaaaccttggaagttatgtatttttattctaattttacaatagaaataaccaaatttcaggaagatgaagtgatttgcctagggttgcatacctagtaagtggtaaacatactatcagattgcactggcattaaccatcctaaagcactgtgctgggcactaaccacccactatacagtctacaaacaggtagctagaaccaaagcttcctgtttcaggtcatttcagggctgtttaatagtttttgtgtaaagcatgtaagaggaagaggacattttctattagatctcaagaaatgtatgttgactgtgatctcaagacctgtgatctcaagacctgtctacagcagttattagctacatgccacatggtatgtctgtagaaaaatgtgtgtgtgtgtgtgtgtgtgtgtgtgtgtgtgtgtgtgttagtaggtaaagaaatttaaaagttaaaggtataatcatcttctctagttactttaaaaaaaattattggcaatacatactgacaccttgttcccctttctacatgccaggtcctgtggaagtttccggggattcagagaggaatcaaaaacaactttggtttctattttcatagatttgacaatccagatggtaaaatggacctaggagacgtgttggtcacttagaagacagattccagcttagcctaaggaaagggattggagaagaagtagatatctgtaagagatattagaaggtagaaaccagtaggtcttgattatggattcagtatagtagagaatgggcaaggggagagaaaagaagaaaagtgtcaaggatgacctaaatattaaggtttataaccagggaagtgaactctagggaatgatggcaatctccttatcatagaataatagggagcattatggatatggaacagggaagcctatacaaatttgatgataaatatgggaattctatataggcatgctataggtgctggtctcactctctcttttgctgtcataatcaaacgccacaggttgtgtaatttataaataacagaaatgtatgtatcacagttctatgggctggaaagtccaagggcaaacttctagcaggttcagttgtacagggagaggtgctctctgcttccaagatggcaccttgatcctgcattgctttgatactgcattctctgcagggaagaggcactgtgtcctcacgtggtgaatgagcagaagggcaagctggctgaatgctgggtgaagcctctctgatgaggatcttaatcccatttaccagggaggacccctcatggcccaattatctcttaaaaaccccacctcttaatattcaagttagcaacacctgaattttggagaggacacattcaaaccatggcaatgctaggtcacttctcccatgaaccattaattattaacaaacaaacattgaaagctttttacttacccctcaaaataaaagcattatgtgcatgtgcttatttgagcataacctatttcttagttatcaaggcacattgggaagaaagcattcaaagatacactgcctctctataggctctgaaaccttcttgtcaccctgctacaactccctgcccttcactttttcctttctgggctacatcagcaggagcaggagagcctagtgaacttcactcttccacccttttccataagttgaggttcaatcaaaggtggtaacgaggagtgaaatgaccaagaggtaacagaaggaaagaaaagaaaaaggagcagaaattgaacactatgtgttactacttatttaggatttgcttttgcctgtattcacaaggatttaaaatataatttaaacaaaaacaaaggttgctattgtggtacagagtataacagattcttattgaacacgtcagcctttctttctagcctgttccctacaatatcagttttattaatattaccttgcttgtggttatcataagacaagggtcttagtgattgatggcttggagctatgggagatttatggaaaaggaaatcattttaggaatgttaagacttcatcagaaaaaataaggttctttacttccagatatgagccagaacaatggaggagaaattcctagctccctcaataaaagtgatataactgagttcaacaggtaaactaagcaaatggcggctaaggggattaattgattagctctaaaaatttaattacagtgtaatctgttagcttctaaaaggacttccctctaaatgaaaggtaatagaatattaaactgccatacattttaatttgaaccccaataatttaaaatgcagtcataggctaaggtatttggaattaattaatgattctaaaagaagattcaaaattattaacgaaaactgaatttaaggtttacaacattattctacaaattatattatttttcctcctttaactatcttagtttactatatcttcagtatactagctttaatttctatatttattattttgatccgtatcctcagtaaaaacataaaagttaagaattcaaaattaaatctgaattatttctcatttgaacaaatgttttaatacttgatgcccatgagtgcaactttgttgtttaaagtgtgactacttatttctacttttccatgataattgcagaataatttagatgagttatcagatttagaaataaatattattatttttcttaaaaaaacttaagtaataaagcccctgttcaagtacaagctgaacgcgctgctttaagaaaagtgtgttgaaataggctaaatgttaccattaagagactcattctgacccagcgtcattggttggccagaaccacagggtgggggtgtgagtctacagataagtctcttttggcctgaacacccacaaaaaaacattcaatggtctggaatactagatccagaaaccacaaaccaaggggagtcagtcaaaagcccctttacaaagtttaaattgagggaaggggtgcgctaccctttcacacttttcctcaggttacaagctgacgcaaaactgacatttatgttcctctaaagagctcttattatcaagtgagcttggtatcagccaactgacagaaaagcaaaattcaccttctgaatttcccaacagctacctttcagcacttaatcttttgcatttcctttggcccagaaacagatcattcaactagctggcttcaatatcaatacatctatttctcaggaaataaaaggaaaagatctaaaacaatcaaaggccaaacacattgttttccggaacaatgatgactaagcaccactgtggaagcaggatcaaccatgccacgatttcgatcattccccctgatttacagttttccaaatgtattagaacatagccaaggtttctttctacaaataaactattgctgcataggaacatatgggtttttaattttaggtgttttattttacattaaatgacaaaacagaacatgacaatgttatatgattttcactttgtcttggtgctgatgaggatattgcctttctcttaaaattctagcagtagagccaggcgaggaagatagcttcagtctacattgccagcccagttctgaatacgtttcactcaggcttctgtcaaaggacattttacagcgccttccatgtcacacttttctctttaccataagggtcagagaaaagttttaatggtaaattggtccatatccataatttcaaggaggattatatgatcaacagaagaaagactgcattcttcacaccccacagacacagacaaacacgtccatatatgaacacacacaaacacacacacaatttttcctagtaacaaacctaacatccccatggagacagtatagagagatcacctttttttgaaactataaacaacaaaagagttcattcctctttttgtctttctctttcttctctctgaataattaagaccctcttgtttttctctgaaatcctgctctttatctttttcatcactgtacttcttctgaatcttctatgggtttttcagagtcctgcactcccttgaagactaaatgaaatatgtctacgtactttgttttggacactgagggaaaagaattcaaatgcatagttgatatgtaacgattgaaagtgttgattgtgtcaaacattccaatttaagaataatttaatcatttcaaatctttatgatatttaagcttagatatattcaaacattcctgtgacacatttgtgatgttaattttgtacccatctttccggtaccatatagagaagcttctacccgaagtatggtgtgccctttataatgcttctttataataaaagtacacagatttgttatatttcaaaaacgacatatataagtcttaaacataaataagttaataaacattttaagatcttgtgcataaggaaagccaaatctaaaatcaggagattttagagtgaaacaaaaggtaagaacttccacaccacaagcttcagcaataactatcccatgaaaaacacgaacaacattttaaaactatattttatagttattaatttatataatattggcttttggagatgtttgcctccatttagtgtctttgtaactttgattaaatatatagtataggggacctggcagggtatcatggtgggcaggaggcaggactggattgcagctctggacagagcagcgggtgagggcttgcactgtgaattttagctccagatcaactgcaagaacaaaccagcaaccccaagaggacccacagaccctctgaagggagcagactgctcctgcaggacctggaagattccccccataactgtgagtgccccaactgcagaattgggaaagggagaccttcctctcccaaacacacgtccccaccaaagaagctgaaggtctgtttgcaggagaagtttctgactttacctggagctgagtcagtttggagagctgagtgaaatacataagtagaggaagcagcagaaaggccctgggagctggctgggtcgcctcgcacgccattcctgcctggcaccacagggatccagcgggagaggaacagggagtgaaactacacagggagaaggaaatctctcgctgaactttgtaacaatttgaacagggtgagaagcctcctggccagaacaggatttgggagggcacaaatccaatgtgcagactccacaggcggggaaagaactaagcctttttctttcgcgcctgggagacggatagtctggggaaggttttcaaggctgtatcgctgtccgcctagaaacggtctggggggctgctgtgtgtgggaggcacagtgggagcaagaccggcccttcagtttgcatgggagctgggtgaggcctgtgactgctggctttccccacttctctgacaacctgcatgactcagcagaggcagccataatcctcctagctacacaaccccagtgacctgggaacctcacccctggccctcacagcagctgcagcaagatgtgcccaagaagaaactgagctcagacacacctagcccggcccccacctcatggtcctttcctacccaccctggtagcagaagacaaaggacatataatcttgggagttctagggcccaacccactgtcggttcctccccatactaccacagctgatgccctctggaaagcgccacctcttggcaggaggccaaccaggacaaaaatagtgcattaaaccaccaaagctaagaaccctcacagagtccattgcacaccattccccaccaccccctacccccaaaccccggccacctccactggaacaggcactggtgtccacagctgagtgacccatagatcgttcatatcacaggactctgcagacaacccctggtaccagcccatagccaggtagacttgctgggtagctagacccagaagagagacaataatcactgcagttctgctctctggaagccacatccataggaaaagggggagagtactacatcaagggaacacccctgtgggacaaaagaatctgaacaacagccttcagctctaaaccttccctctgacagagcctactcaaatgagaaggaaccagaaaaccaaccctggtaatataaaaaaacaaggtcttggaattaacccaatccaacaaagacaaagaagaaataatacaaaaatatgaacaaagcctccaagaagtctgagattatgttaaacaaccaaacctaagaataattggtgttcctgaagaagaagagaattctaaaagcttggaaaacgtgtttgggggaataatcaaggaaaactttcctggccttgctagagacctagacatccaaatacaagaaggaaaaaaagaacatcctggaaattcatcacaaaaagatcttcacctaggcacattgtcatcaggttatccaaattaagatgaaggaaagaatcttaagatctgtgaagcagaagcaccaggtaagctataaaggaaaacctatcaggttaacggcagagttctcagcagaaaccctacaagctagaagggattggggccctatcttctgcctcctcaaacaaaacaattgtcagacaagaattttgtatccagcaaaactaagcgtcaggtatgaaggaaagatacagtctttttcagataaacaaatgccgagagaattcaccattaacaagccaccactacaagaactgctaaaaggagctctaagtcttgaaacaaatcctggaaacacatcaaaacagaacctctttaaagcataaatcacacaggacctgcaaaacaaaaacacaagttaaaaagcaaaaacaaaaaaccaaataaacaaaagtacacaggcaacaaagagcatgatgaatgcaacagtacctcacattttgatactaacattgaatgtaaatggcctaaacgctccacttaaaatatacagaaccacagaatggataagaactcaccaaccatttgctgccttcaggagactcacctagcacataaggactcacataaagtaaaggggtgaaaaaatgaatttcaggcaaatggacaccaaaagtgaacggggtagctattcttatatcagacaaaacaaacttcaaagcaacagcagttgaaagagacaaagagggacattatataatgctaaaaggccttgtccaacaggaaaatatcacaatcctgaacatatatgcacctaacactggaactctcacatttataaaacgattgctaatagacctaagaaatgagatagacagcaacacaataatagtgggagacttcagtactccactgacagcactagacaggccaccaagacagaaagtcaacaaagaaacaatggatttaaactataccttggaacaaatggacttaatagatatatacagaacatttcatccaacaaccgcagaatacacattctattcaacagcgcatggaactttctccaagatagaccataggataggcctaaaatgagcctcaataaatttaagaaaattgaaattatatcaagcactctctcagaccacagtggaataaagctggaaatcaactccaaagggaaccttcaaaaccatgcaaatacatggaaattaaataacctgctcccaaatgagcattgggtcaaaaatgaaatcaagatagaaattaaaaaattctctgaactcaatgacaataatgacacaacatatcaaaacctctgggatacagcaaaagcggtgctaagaggaaagttcatagccctaaacacctacatcaaaaagactgaaagaacacaaactgacactctaaggtcacgcctcaaggaactagagaagcaagaacaaaccaaacccaaacccagcagaagaaaggaaataatcaaggttagatcagagctaaatgaaattgaaacaaacaaacaaacaaaatacaaaagataaatgaaacaaaaagctggttctttgaaaagataaataaaatcaatagaccattggcaagattaatgaagaaatgaagagagaaaatccaaataacctcactaagaaatgaaacagagatattacaattgacaccactgaaatacaaaaggtcattcaaggctactgtgaacacttttatgcacataaactagaaaatctagaagagatgggtaaattcctggaaaaatacaaccctcctagcttaaattaagaagaattagatacactgaacagaccaataacaagcagcaagattgaaatgctaatctaaaaattaccaaccaaaaaaatatccaggaccaggtggattcacagcaaaattctagcagccattcaaagtcagtcaaatggtagcaatcattttgacactattccacaagatagagaaagaaggagctctccctaattcattctatgaagctagcatcaccctaataccaaaaccaggcaaggacataaccagaaaagaaaactacagactgatatccttgacgaacacagatgctaaaatccttaacaaagtactagctaactgaatccagcaacatatcaaaaagataattcaccatgatcaagtgggtttcatgccagggaggcagggatggtttaacatatgcaagtcaataaatgtgatataccacataaacagaattaaaaacaaaaatcacatgatcatttcaatagatgcagaaaaagcattcaacaaaatccagcatcgctttatgattaaaactctctgcaaaattggcatataaaggacatagcttaatgtaataaaagccatctatgacaaacctacagtcaacataatactgaatgggaaaaagttgaaatcattccctctgagaattggaacaagacaaggatgtccactctcaccactactcttcaacatagtactggaagtcctagccacagcaattagataagagaaagaaagaaagagcatccaaatccataaacaggaagtcaaactgtcaccgtttgttgacgatatgattgttcactttgagaaccctaaggactcctccagaaagttcctaaaactgataaaagaattcagcaaagtttctgggtacaagattaatgtacacaaatcagtagctcttctatacaccaacagcaaccaagcagacaatcaaatcaagaaccgaaacccttttgcaatagctgcaaaaaaaaaaaagaagaagaagaagaagaagaaaagaaactcaagaatatacctaaccaaggagtcaaaagacctctacaaagaaaactacaaaacactgctgaaagaaatcatagacaacatgaacaaatggaaacacatcccatgctcatggatgggtagaatcaatattgtgaaaatgaccatactaccaaaagcaatctacaaattcaatgcaatccccatcaaaataccaccatcattcttcacagaattagaaaacacaattctaaaattcatgtggaaccaagaaacagcccacatagccaaagcaagactaagcaaaaagaacaaatctggaggcatcacactacctgatttcaaactatactatactataaggtcatagtcaccaaaacagtgtgatactggtacatagatcaatggaacagaatagagaacctagaaataaacccaaatatttacagccaactgatctttgacagagcaaacaaaaacataaagtggggaaaggacagccttttcaacaaatggtgctgggataactggctagccacaggtggaagaatgaaactggatccttatctctcaccttatagaaaaatcaactcaaaatggattaaggacttaaacctaagacctgaaactatacaaattctggaagataacattggaaaaacccttctggaaattggcttagggaaggatttcatgaccaagaacccaaaagcaaatgcaaaaaaaaaaacaaagataaatcgctgggacctaattaaactaaaaagcttttgcacagcaaaaggaacagtcagcagagtaaagagaacccacagagtaggagaaaatcttccccactatacatctatacatccaacaatctatacaatctatacatccgacaaaggactaatatccagaatctataatgaattcaaacaaatcggtaagaaaaaagccaacaatcccatcaaaacatgggctaaggacatgaatagacaattctcaaaagaagatatacaaatggccaacaaacatatgaaaaactgctcaacatcactaatgatcagagaaatctgaatcaaaaccacaatgcgatatcacctcattcctgcaagaatggccataatcaaaaaaaaaaaaaaatcaaaagactgtagatgttggggtggatgtggtgaactgagaatgcttctatactgctcgtgggaatgtaaactcgtacagccgctacggaaaacagtgtggagattccttcgagaactaaaagtagaactaccacttgatccagcaatcccactactaggtatctacccagaggaaaagaagtcattattagaaaaaggtactgcacacacatttgtagcagcaccattcacaactgcaaaatcctggaaccagcccaaatgtccattaatcaacaagtgggtaaagaaactgtggtattccattccacacaatggaatactacacagccataaaaaaggaatgaattaatagcatttgcagtgacctggatgagactggagactattattctaagtgaagtaactcaggaatggaaaaccaaacatcgtgtgttctcactgatatgtgggagctaagctatgaggatgcaaaggcataagaatggagcaatggactttggggacttgggggaaagagtgggaggagggcaaggaacagaagactacaaatatggttcagtacacactgcacatgtgataggtgcacaaaaatctcacaaatcaccactaaagaacttactcatgtaaccaaataccacctgtaccccaataacttatgacaaaaattaaataaaaaattcaagttaagaaaataatactatttacaacataaaaataaaagtccaaacacatttaaaaatatatatatggtataggtaaaaaagggaaattttatttcttcaattataaaccttaaatactcaaacttgtttatatatcagttacatatataattgttatataatcagttatatatataactgatgtttatatataacagttatatatataatatgtattacatataagcacatatacaagatatatgttatatatatcactatacatctatcagtaaaagatgtatacatatatacatacttttcatatgtgaactatgagaacaaaatgagaatatctgattcatggatagagtctgtttgtctttaagggtgggaaaaatgggaaacctattaacattttgatatctcctttgagcatcctgtaggcattttcttaccaaaaaaaattaaatttctattcagttagtgctattcttggcttaatattttagtctatgttgtttttctttaaactgcaacctatacatgcaatagtagcaggtaattctgcgaagagattgacagtaaaaggtgtttctaattggaagaggaaaggtggtttcaatttaatgaataaactccatttctacactctttccccttctcaaatttgacatccaaaaatgagtttggtttaaggcacacacttgtcttctactctttccctcacacctgttgtggagtagataaaggtgtgaaaaatgtgagtccactggagtcatacagttctaaaaagtggttaagggcaataggtgtcaaacagagctgtgattgtattaaaaatatatatatatatgactactttaactctgtcatatatctctcttgttcatatattctgtgtagcatttgattctgtggagaagacaatacatttcaattacttagtgtgttgatagaaaattcttgttgggggggaatctacactagacagtgtctagtgaatttagtctgacaatttaaataatattaaaactaatcattaatgcaatgccaaaactactgaaaactatgctggtctcttgaaataatgcttattttgaaataacctttaaaatgatctacaaagtaatttaagtaaatttattaaaatgttcacaatgtcacccagttttattttattttgttttattctatttgggggaggatgaactatatggtgaagaataacccagtttgactactattttctgataaaactcaacaaagctttagaagaaaattatatatattcccagactcaaatctaattctgatatcaaggttatatattttttgcaagaggagtgtagagaaaaacaaacagatgttgcaacatatgaagatttgccttccctagcagagtgtgaatttccttttgagctatactaatttatttgcatctgctggagaggtgcaggaattatctgaccactgtttatctagaaaaagaccacagtagtgttgctattatggcatgaaactgtttcacatttagttaactgtttagaatcggtctgctgaactgaatcctcacatacagagttataattttcacattttgttttatttttccaaaccggtctgtaatgttaagaaggaaaggaaggtttttggagggaaaagcttatggaggagtgtggaggtaagaaagtagttggcacatctgagaacaaaagggccagtgtgtctaagcaaagatctcccaagtagagtacaggggtaagcagaacaatctattggagtgcaggaagaaacagagtatgtattcatgtttatattttatttataaatgagtcaatgaacttgctgatactaaatatagagatgaatatgagtgtcttcccaagtcacctgtcatttgtggttataatttataggttgacacgagtacgtgtcagttatacatcatgtgcagtctgaatggtgtcctaagggaagaaagaacgtaggctcccgcgtgcaaaagtgtcatcatccactgtctttcaagtaaccgcaaagcattgtgtcagtaaatatgcttgtgtaagcaaagctacacattatattgcctgcttttaactaatgcgaccctcataaaatggacacatggcttaagattattcctccaaggaagccacagatagactatcttgcctagaatcctgcctttgccgcttatgagatgtacttgaatgcttaaacagtgcgcatctctgagtttctcctgtctgaaatcaaacattggcatatttctcaaggattgtggtggagattagatggtgatatgatttgtctgtgtccccatccaattctcatcttgaattataacaatccccatgtgtcaagggcagggccaggtggagataactgaatcataggggtggtttcccccatacttttattgtcttagtgaataagtttcatgagatctgatagttttataaatgggagttcccctgcacaagctctcttgcctgcagccgtgtaagacatgtcttgcttcccctttgctttccaccatgattgtgagggctccccaaccatgaggaactgtgagtccattaaatctttcctttataaattacccagtcctgggtatgtccatattagcagcatgagaacagattaatatagatggtctagcatatgttagcctcttagaacagtacatcttagaacagtacatagtacatgctatggttagttgctatcacctctactactattatatttactagtgaatataggaatcagcaaaagaggaatgacagagcccaaattgcctttactctgagcacaaagttttcatcaagcattgtattaatcagggttctcagggaaacagaacaagtaggttacacgtacaaacacacaccccccccacacacacatctgtacaaatcacttacataaagacagagattttaagaaattggctcacatgatggtggaggctggcaagtctcaaatccacagggcagactggagacccagggaaaagttgagcctgcattgtcatgtttgaagacagtctggaagaattccttctttctggggctcctcagtcttgtttcttaaggctttcaactgattgtatgaagcccactcacactagggagagtattctatttcactcaaagtctactagttaatttaaatatgaatcacatgtaacgtactctcgcagcaacatctaccctggtgtttggccaaacatctggacaccatcgtctagccaagttgacacataaaaataactatcacaggcatattacacgtcaaaaaccataagaagctaatcaggattatctatgctgtcatgtgttcatttgctcttcattcatttgtaaagaaagaaaatggtctgtcaagctccttctgtaagttggtatgtcattctaggttccgaggacacaacatcaaacaaaatagattagttcctggattgtggaggttatgttctggaggtggtagataaacaagaagcaaataaataattggctgaagtgggagaattgcttgagccttggagttcaagaccagcctgggcaacatagtgagaccccacctctaaggaagaaaataatttatttacttattttattttaaattcaggggtacatgtgcaggatgtgcaggtttgttacataggtaaacatgttatgggggtttgttgtacttattatttcatcacccaggcactaagcctagtacttaatcattagttatttttcctgatcctccctctcctcctaccctccaccctctgataggccctagtgtgtgttgttctcctctatatgtccatgtgttctcatcatttagctccaactgataagtgagaacatgtgctatctggttttctgttcccgccttaatttgctaaggtaatggcctctagctcatccatgtccctgcaaaaaaacatgatctcattcttatctatggctgcatagtattccatggtgtatatgtaccatattttctttaaccagtctatcatcaaatggacatttaggttgattccatgtctttgttactgtgaatactgctgcagtgaatatatgtctccatgtgtctttataatagaagtatttatatttctttgagtatatacccagtaatgagattgctgggtcaaatagtgcttctgactttaggtctttgaggaatcaccacactgccttccacaatggttgaactaatttacactcccaccagcagtgtaaaagcgtttctttttctccacaacctcaccagcatctgttattttttgattttttaatagtcattctgattggtgttagatggtatctcattatggttttgatttgcatttctctaataatcagtgatgttgagctttttttttttttgagatggagtcccactcttgttgcccattctggagtacagtggtgcgatcttggctcactgcaacctctgcctcccaggttcaagtgattctcctgcctcagcctactgagttcagctgagattacaggcacttgccaccacacccggttaatttttgcacttttagtagaaacggggtttcaccatgttgtccaggctggtttcaaactcctgacctcaggtgatctgcccatctcagcctcccaaagtgctgggattacaggcgtgagccaacatacccggccaagcctttttttcatatgcttgttggccacatgtatgtcttcttttgaaaaggatctgttcatgtccttggcctgctttttaatggggttgtttgtttgtttcttgtaaatttgtttaagttccttataaattctggatattagacctctgtcagatgcatagtttgcaaaaattttttcccattctctaggttgtctgtttgctctgttgatattttcttttgctgtactgaagctctttagtttaattagatctcatttgtcatttttgcttgaaaaataaaatttaattggcatacacaaatgtgcgtacatcagggtagttgcagtgatgtgcagagtaaagagaataggaaatgcaatgggtaggaaggtatctgctgtcaatagaagctttgagagcagagacctaaaggatatgagagaactatccatgcaggcagtacagagaagagcattccaagcagagagaagaataagaaataaatgttcttgatgtgtccaaggatatgcaaggaggtcagtgtggctggagttgagcctgctgggaagagatggatactcaatacaaaggagagtgaagtaaggtcatgtacaaacttgtaggccattgcatggtggtggtggtgatagggatagagaattttgagcagaggagagacatatctgatttaccttataaaagtgaatgactctgagtattgtgtgaccaacagattctgtggggactgcagagagacagcaggctatggcattaatacatgtgaggtgatggtgacttggactaaagtgacagtagtgatggtaaaggacattgctcagatttcagacatatagacacatggctcaagatgattcctacaaaggatccacagatagactgtcctgcaaaagttgatggtgcattctcaagtctgaagacagtagggaggcagaattccttctttatgggggtgctcagtcttttttcttgaggctttcaactgatcggatgaagcccactcacactggggacagcagtctactttactcaaagtctactaattcaaatatcacatctttacaaaggtactatcacagcaacacctaccctgatgtttgagcaaacatctggatgccgtaatctagccacactgacacataacacacataagatgttctgaaggtacagtcagaaagattgatgaatggataggatatggtttatgaaactaaagagaagtcaaggatctctctgtggctcttagactgaacaaagggaagattaaagttgctaattaccgatagggcaacaaatgaggaagaagtcatggagatcagaaatatggaattttgtctggagctgttaacaatgtgatgcctgacagacacagacgtggaggtgctgagtcaatatttttctagaataatctagagaccagtggagaggaccaggcttgagatgtaactgtgtacattgacattcaggtggaaagtcatgagcatggatgagatcaactaagataaaagtgcagattcaatttcttattgggtgctggtatattctgtcatttagagaggtctgagagaagagacagaaccagaaaagtagacaaggcatcagaaagtgagtttggaagaaactgagagaatggttttccaggaagtcaggtgaagaaaacatgtcaatgaggagaaaatggccaaccatttcaagggctgctgggtggtcaataccatgtggactaagaattggtcaatggatttagaagcatgaggttcattggtgaccttggcaagtgcaacttcagtggagctgtggtcaagctagaggagggactaaagagagtgtgtacagaaaactccttggaggagctttgcggtaaagaagagtagaaatattggtctatacaggagtcaagggatgtttttgttttggttatcaaagagcagatattacagattgtgtatatgcttatggaaataattcagcagaaatggagggagaacatcaatctagaaagaggacaaacaattccttgaggtatgacttgataaggggagaagggatgggaacagaaggagttgtgcttgaataggagcactgagtccagagcactgagtccttttcttattagaaggatggaggcagagcatctgtgcacaaatgcaaacaacttgttagaagtggcagcagacaccgtcaccttggtcccattaaaaacattgtttgttagctagaaagaggatatcaaatgttcccaacacaaagaaatcataagtgtttgagataatgtatatactcactaccctttctgatcacaatacattctatgtatcaaaatattactaggtaccccataaacatgtatgactgttgtgtgttaagataatgaaataaaatatataaaatttcattatttctattctagctaatattaatgtattgatcagaataaaaagggtatgtgtgtgtgtgtgctgttaatactaagggataaacctttaaaatatgtatattttattcagcttatatttaaaatgttttgagtgtatttattaatgtacttatgaataaatatacagataggcttatattttaaataaatgaaattgtatcaaggaataatttcaaaatgtattattgataggggtttgttagcataggatttttaagactacaactgtggaatgtaaattgtgtgggggttggatgggtgtgtagaggggggtgttaaaagttaataattaaaagttagaaatcttatttttaaaagttaaggaaagttaagaaagtcttttaagactggcaaggagtttgtgtattatcctatttggggtaaggagatatcagagagtttgagaactagcatgataggatcccatttgagttttgaaaagtttatttcatagagaaaaattatgaggcttctttgatattagtaacagaagagggaaggcagaagagagaggagaaagagaaatagagagaaaagagagagaatggtgaggaggaggacctgaatttaggaaatattaataacagtaatatttggggaggaataaaacagatgacaaaaattcagaaggcattggtggtatttattaagataagcaaaatggaataagaaaaatttggcaggaagcggtggaagaggtaaatgattcatttatttttgtatatattcctttcaaaattcctgtggccaaccccagttggtatactcagcaggcagcatgtgaagtgaatatctgaaacccggaagaggattctggtatagaaatgttagagtcactagtttaacctgagaaatcgcattcagctctaattctgaagctgatatctgtccttcctgtccatgttattatactttactacatattcatatccacaaataataatggttatgttttgatttttaaataatttgcatgaatggcaccaatatgtatgcttcctttgacaagatgtgtttacgctcaatatcatgctgatacatattgatctggttcagagattggcaaactgtggcccataggccaaaatttaacccaccattagtttttgtacagatttcaggcccagaaagtatttttaaattttaaaatttgcaatcaatttgatgataagaaatgctaactttgaaccccaacttaataaaattgtatccccaaaaggaaatcttattctcattagtagaactgtcttataaacaaataaacaagaaaacaaactaaaaaccaaaaatctttcaatttttatgattatatttcgaattttactaaccccaaagttgtggaaatttgctttttctcttgttaaataagtatttacataatatcctcaactcacatcttttttttcaactcacatcttgaccaaaaaagccccaaagagtaaacctgatcaagttaatttatcaattttggtgattgatgttttcccacattgtaagtacactacaatttatctattgattacttaatgaatgagttgttttctatttatgccattaaaaatttcttatttgaaccccgaataacttagaaacatgtctagttttcaaaatctaattttagatttattattctatccagaatgtcatacacagacagttcctgacttacgatgggtctacttaccatttttcagctcaacaataatgcaaaagtgatacacattcagtagaaactacacttcagaatttgaattttgttcttttctcaggctagcaatatatggtacaatactctcgtgatgcagggcagcagcggtgagcctcagcagccaggcagccgtgcaatcacaagggtaagcaaccaatactgcacagtgtggtgtattcaataagttatatgagacactcaacacttcattataaaataggctttggggtaattttgcccaattgtaggctaatttaagtattctgagaatgtttaaggtagactaggctaaactatgatgtttggtaggttagatgtatgaaatgcattttggggccagggcggtggctcacgcctgtaatcccagcactttgggaggccaagacgggtggatctcttgaggtcaggagttcaagaccagcctggccaaaatggtgaaaccccaactctactaaaaatacaaaaattagccaggtgtggtggcaggtgcctgtaatcccagctactcaggaggctgtgacaggaattgcttgaacctggaaggcagaggttgcagtgaggcgggatcacaccactgcactgcagcctgggtgacagagtgagactctgtctcaaacaaaagaaaaagtaaaagaattgcatttttgacctaacattttcaacttttgatggttttattgagatataactctatcataaggcaagaaacgtctagagttgaaattatatattatgtagccttctcagactgacttctttcatttagcaatatgtatttaagatttttccatgtgtcttggtggcttgatagctcatttctttttattgatgaatagtattccattgtgtggatgtaccccagtttgtttattcattcacctgttaaagagcatcctggtttccagttagcaataattataaataaagctgctataaatatctatgtgcaggtttttgtgtgaacataacattttcaactaatctgtgtaaataccaaggagcctgactgctgaatcataaggtaagagtgtatttagctttggattcaaactgtccactatggtttagatatggtttgcttggccccactatgtttcatgttgaaatttggtccccagtgttaaagtagggcctggtgtgtggtgttgagttgggaagggtgcagatccctcatgaatggcttggtgccatttcttcatttgtgcaggagtgaattctcactctcagtcactgtgagaactagttgttgaaaaaagccttgcaccacctcctctctctctcttgttttttctctcatcatgcggtctctacacatgagctaccctttgccttctgccatgaatagaagcttccagatgcttaaaagcagatcctggcaccatgcttctagtacagcctgcaaaactgtgagccaaatgaacctctttttttaacaaatcacccagcctcaggtatttctttatagcaagacaaaaattgactgtcaaactttttgttaaagtggctgtaccgttttgcattcccaccagtcaagaatgagcattctgatgctctacattattgcaacttttagtattgtcagttttctggatttattctagtaggtgtgtagtggtatttcattgttgttttaatttgtaattctgtaatgacatatgttgagcaaatttttttattaataggctctgttttttagggagaggatcataaatttattaactggtataattttaatttctcatggaataatttgaccagagaggcagtaagtttactgtcccaatttgcactggtggatgagttttgcgtgttttcacttcccaaggattaaattctttccagatatttggcttatgtgggaatctcagaatcaactctgtccagtaggtccaaagccacaccttcttcctcggggtgggctatagacctccagagagcccctaggatgctgtagtgttgacacatgtgactccatttttggtttggtgctctccttgatttttggaattgggctttgccattctttctctcataactaggtatctgttcaataaagtattattgatatgtggcctcactctttatgtggtagaaactgaatttctttttcaaaagcacctagaatataattgttttaaaagaaaatcaatgagacctgtgttttattactccaggaccaggtaacaaacaactaggaacaccctctatgctctggagcctatgaaataattcaaattatccaatccacaggaagccctggaaacctagctaacctggccccatgtgccatactaagctgaccctcactgctccatgaataaaaagaaaaatgttaaaaatgttaaaaaatctaagttaccatcctcagaaatcagaaaagaggatactggaaaaaacacaagcagaagaatgtaatatcattgagataatttattttaaattttaagacagaaaagcaagagagaaaattaataaaatgaaaagctaaatttttgaaaagattaataaaattctattcagcatggtaaaaaagtagaagagaaggaacacaaatttaaatatcaagaataaaagatgggattgtactatagtcttgtaaatcaaaaagacaccgaagggatactaaaagtataccacagatgacttaatgtttatacattttacaactcagctgggcacagtggctcatactgtaatcccagcattttgggaggctgagaaggaaggattccttgaggctaggaatctgtggccagattgggcaacatagaaagatactgtctttataaaagatttaaaatattagccaggcgtggtggcatgcacctgtagtcctcacttggcaggctgaggcaggaggatcactttagcccaggagtagaggccacagtgagctataatggcaccattgcactccaacctgggtgaaacagaaaatccctgtctcttaaaaaaattaatttaaaaataaaaatagatttttaaggcataaatttgatagatgaaatgcaccaatgtaaaatagttactgaaaaaatactgacttgacccactttgaggacttggctacaggacagttaatttcccctcttgagtagctgattaaatccacactctaaccatttcccttactgggcactaacactcttggctactgtgcacctgttttttattactccagggccaggtaacaaacaactagaaacaccctctatgctctggagcctatgaaataattcaaattatccaatccacaggaagcccaggaaacctagctaacttggcgttatgtaccatactaagcagacccctactgtttcggctcactgttaccctgtccctgggagcaattccttttgtggccctgcctggcagccttctgtcatttggagctgtaagtaacaaagagctatatgtttcatctaacatgcctagtgtcactgtgttgtgtcctaccatccaaaagatcctacaatcttataaaacaatcaatccttaaagaaaacattagctactgaaactcatttaaaaataaatgatccaaagaataatattatagctattaaataaatcaaatccataattaaaatccttcaaaaacaaaaacaaaaaacctccagatcctaggtggtttcactagcaagttctaccaaacacttaaggaagaaataactcaaatactacacaatatcttctagtaaatgggataggagggaagagttcccagctcattttatgaggctaccattactttgatgccaaaactagacaaaagcattaaaagacaggaagcccatacaccagtatcacttatgaacctagatggaataatcctccataaaatgtcacaaattgaattcaccatttagaaaacatataacatatataatatatgcatgctatcaactgagacttatctcaggaatccaaggatggttcaaccttcaaaaatcagtataattcaccatattagcagaataaaagaaaaaaaaatctcaaaagatgtgaaaaatagaaatagcatttgacagggcttaagatttacttagcataagaactctcagcaggctaggaatattagaggacttcctaaacatgatacagggcatacataggaattaaaaaaaaataagctaacattatgaaagcatgtgtgtattccttctaagatcagggacaaggaaggcatgtgccccctttctactcctagtcatcattgtattggaagtcctagccaatgaaataacacaagaaaatgaaataaaagaaatatatgctgggtgcagtggctcatgcctatattcccagcactttgggaggccgaggtgggcagactgcctgaactcaggagttcaagaccagcctgggcaatgtggtgaaatctcatctctactaaacatgcaaaaatcagccaggcacagtggcacatgtctgtaatcccagctactcaggaggctgaggcacgagaatcgcttgaacctgggaggtggagcttgcagggagcagagattttgccactgcactccagcctggaagacagagtgagactctgtctcaaaaaaaaaaaaaaaaaaaaaaaaaagtgtatatatatacacatatataggaaatgaagaaataaaactatttgcaatatcatttacacaaaaaagtcccaaggattctatagatacttgtcaaattaataagtaacttttgctgtgccacaaagttgcagtgagtgtacaaaaatcaattatatttctatatactggcaagaaacatttcaaaattgaaaatttttaaaaagtaccttttacgataacaattttaaaaaatgacttgggaaacataaatctaacaaatatgtacagaagcagtatgccgaaaactctaaaacaatgaaagacatcaaagacccaaataaatggaaatatatgccatactcttaaattaaataaatttaaatggaatggaaatatataccatatttttaaattagaggactcattattgtttaaaaaatcaactctcctccaaatgacacatacattctgttacatacagattcaaaatttcaacattatttttgtagattttagttaatcttattctcaaatttctatgaaaagttaagaaaatagaaaagccaaagcaattttgaaaaagagcaaagttggaagattcatagtatcttatttcagtgctttctataatggtacattaatcaagacaatgtcacatttttgaaaaatagacatatggatcaatgagacagaacaaaattcataaacgaacaagtacaaatgtattgtttttgacaaaattataaatccagttcaatgcataaagtatagtacgtttaacaaatgatgttggaataacaacaaatgctgttgggacatcatatgcactaaaatgaaccttagcccacatctcacccgtaaacaaaaattaattcataatggttcattataataacaatataaacaaatgctgttgggacatcattagcccatacctcacccttaaacaaaaattaaatcataatggttcattgacccaagtgtaaccctaaaagtatacaactttctgaagaaaatacaggaaaaaatcctttgtgaacttcggccaggcaaaatgtttcttatagtataccaaaagcatattctattaaatgggaaaaaatggtaaaatgggtatcaaaattaaacatgtctattatctgaataaaactaaaagtgaaaaaaaagcacaagctgctgactggtagaaaatatttgtaaatcataaatccttcaagtctttgtgtttagaacacacatagagacatcatagataatatatataaactcaataataaaaaaacagacaatccaattaaaaagtgagcaaaaactttaaacaaacacttcaaagaaggtatgtgaactgcaaataagcacctgaaaagatgactaacagaattagtcattaggaaatgcaaattaagccacaatgagatactactacatacacattagaagtgcaagaaacaaaaataaacaaacatgaatgcctggcaataccaagtgcgtgaggatgcagaggaactgggactcggctgcattgctggtggggttgcaaaatcatacagcaacttaaaaaaaaaacagtttgactgtttcttataaaagtaattatatacttaccacgtgaattggcaaacctgttcctaagtatttattcaagagaaatgaaaatgtatcatcatactaaaacctggacaatgaatagtgttagtggcttgactaaaatcaccatgaactggaaacaactcaaatgtccttcagcctgggaatggatacatgaactgtagtgcatccatacaatggaatattattcagtaatgaaaaacatgaactattgatgaatgcaatgacatggatgaatctcaaatgcattcattatgtagtcttagaggtcagtgcactatatgattatatttaaatggcattctggaaatcgatcagtggctgcaagggtatgaggttgaggagagggattaactgcaaagggactaggttagagaagtttttgagatcatgaaaatgtgtttagtttgtggtgacagttaaataatttttaatttttgtcaaatttttattactatcaaaaatagtaaattttactgtatacaaatttaaaaataagataaagccatgcttcattactaccacttcatactgtcagtaacccattcccattgaaaatgaatattcgctgcatgtgtacctggattttgtaggtatctttccaccttcccgtggagcattaaacattgctcactggataagtcaagaatttagagtgatgatctggtttgtaattgtcctttttatgttctaaatagactaattttatattccccaagtcctttcctaagatggatggctccagtaaatctctcactccttcgttccatttccagtaacacgaacaacctgcgttttcctacatccgccccaccctaaggcaaagacaacctcctacggggaccagcttcttggtgggaataggatgtttccacctcccattgtatattgacacttgctatgtttcttgccataaatcacttgatgacatcacattgttgctataaatccatgaacaaataagctatccttccattagggaacataaaatggtccattttcagactcagtctgcatactgtttatgggttgcttgctgctttcagggtttttacaagagaacatccactgtttctttctggccctactccagagagctatgttaatattgcccactttccaagatatttggtgagaacacggcataacggagccacattttccatcagggacctgcaccacattttcgtctctatttcccagacaaattaaacccgctgttttatgagcttcttcaaaggcactgcacagtagctcactttattgaatatggatactacttccactcggaaaaggaatcctaagataacaggacctagagcttagaaattctagagcacagtaattattaacttcagatattaagtttaggatctgatcctgaattatttaacttccttagaggaagtgaggcaatgggctaatctatgtcattggaattgaagataccatgatctcaaatatattatctgcttacacaggggatgaaaatggaatctacaagcatcaagcatcaagcgggggataaattcttatgtcatccattctttcatttttttaatttgagatggaaaataatgctctagtctcagcaacctcaacattcagctctgtaattttcttttatgtttttcaggtcaggagtttggttaaggattttaacctaggagtaagttggagtgacaataactcaaataactcaaagaattgagaatttgaattgctcaaagaagaaacagatgtatgtatttacagatatatatttggatgtatagatagaactacatatatgtatctatagatacatagtatatgtatgtatttatttatagaaacaaaaatctacatataatattttaactttttacttattaaccctttcagttattattgctagattatccaggtcaatgcttagtttttattttggtttgtttgttttcttttcttgttgtccaaattaaattatttaggtatgctcacgcctgtaatcccagctctttgggaggccgagactggtggatcatgaggtcaggagatcgagaccatcctggctaacacggtgaaaccccgtctctaataaaaatgcaaaaaaattagctgggcctggtggtgggcgcctatagtcccagctactcgggaggctgaggcaggagaatggcgtgaacccaagaggcggagctggcagtgtgctgagatcacgccactgcactccagcctgggcgacagagagagactccgtctcaaaaaaaaaaaaaaaaaaaaaaaaaaaaaaaaaaaaaaaaaaaattagttaggtgtgacagattttggatacttgtctaattacttctgtggttcttagtttccacttttatttagcaaaaagcaattatagtaatactaaataaaatatgctaaattcattatgatatgataagtaggattgtaagtgtgttgcatatgttttctcattttaaagacaacaattctctggggtatggattatcattattattcttattttgtagattaggaaaatgaacaacagaaaattgggcgactatctaaccttgctcaacttgtaagaggagggtcttgatttcaaatgcatgtctgactttaggaagcttcctttcctcccctcgcctcccctcccctcccctcccctcccctcctctctcctctcctctcctttcctttcctttccttttttctttttttttgagatggagttttgctcttgttgcccaggctggtgtgcagtggcgtgatctcagctcactgcaacctccgcctcccaggttcaagcgattctcctgactcagccttctgagtagctgggattacaagcgtgccggcaccacgcctggctaatttttgtatttttagtagcaatggggtttcaccatgttggccaggcttgtctcgaactcctgacctctggttatccacctgcctcagcctcccaaagtgctgggattacagacctgagccacggcgcccggctgggagcattattttcaaaacaatccaatactgaccccattttactaataatttaaacaaaaagaatggtaaattctttacccaatatttattgggaaaataaataccttactgtgtttgaaaaaaaacagtgatatgcaactttactttggataaagctttgttgatgttgtttttaattgagaatcaataatgtaagatatcatgcttatgagttggtaaagcaaatcacagagtgcaagatacatgcattgatttattggtgagtcttgaatggtttgatatttggtagaaatttcatctgctactaaaatgacaattaaattatttaggtttcaaaagcataataccacaatcctgtaaaaatatcaccttggacaaattagggagttaggaataattaggtaaaggtttttggttaactgccaccttgattactggtcttaggatatttcaggtatttttgaattgcaactatttgagaagccattggtttttgttatagagtaattaacttagtgggcagctccaaaagtggggtagggagttagcttctgactgacagagggaacttatgcacactaattgcaatgaaagatggtcatcctaacttctcaaaactgatagagaagctaaggacatgtgccaaattagaacagtagctgtgaaagctgagtttatcccaagactgaaagaaacgaaacaagtgattaatgaatgtgctattaaggcaaccaaaaatgtcaggcacaaaaagatcaagaataactgtcaggttctagaggcccagagtttccaagtctccaagagggataaaggcaatgattaaatattatttcaatactataatgtaaaaagctcaaaaggaataaagaaaacatatccagcttaaatggtttccttcacatttgtaaagctagatccaatatcaaataacctccaaggatatagcaaatgacttgaaatttcattacgcgggatcagaggagcatttggagtctatatacatagagaaggataagaagcagttactttaagaatgaagagtcttcctacttctagagagagtggaactctaatgctttaggataaaagtttgagtatctctgtgcaccatctagatctttaagatttatacatatatgcatacaccataaatcacgtagataatctgataaaagctattgatcatctccccagaaaaagtatccacctactcaaatatttgtcataattctgttccacggatttgagatgttcaagaaatcccttgcatgaagaacccttacaataaagcaatttagaatctgcatttgtctacttcctttcttgcaaattatgctagtgtaccttaaatcattttgtccttttgttgaattaatctatttatggtagtaaaactgccttttacatctacaaggccattgtggactacgagaagtaaaatctgggcaatacatagtacaactaaaagtgtagtcttcgctgtcagttacacgtttaaatagatctacctccatattctaactctggaaatgtgagcaatgtagttaaatttttaattttcagtgttctcacctatcaaaggaggattacgtctttcatggatcttagttaggtttaaataagatatatttgatgcctagttacttctctggtacatactaggtactcaaataaatgtagacagttactactagtccaaactttatgtttgtggtgtgtgtgcatgtgtgtgtaatcccatatggtgagagtactcttctctctcatgagcatattaaaaagaagtatataaaatttcaggaaatgcaatccctttgtgactttgcactgaagaaactaagacattttactgccctttaggttaggtggtggtgtgggagtcggggttgagatgggggagttcccccattccaaaaaattgaagtagaaatatttgttttgttccacatacctaccccaccaccaccactaccaccaccaacaacaacaacagcaaagaaaaacacacacacacacacacacactcaaaactaaaacacatggaagaaccctagataattaaaggacattccaaaggtcagaaaattggcaaggtggcccagatttgcaggtagaaataggttgttctacagtaaaatttaaagtaaatgtgtgcaagagaaacttctgaaaatcccatttacaattgccttattttttatttcaaatagtccagtaaactaacactaatgaaaagattcacatagaagtatagcaaactgagggcactcagctgtgatgctggtagcaaagagattggagatgagcagacttaatggtgaagactaagaagggggatccctggtaggcacagtgatagccagctgatagcacagccagctgatgacagccatccattcctggggcccctgtcccacaatttccaattcaaattgacacaggaaaagtcataaccatggttctgctgtatgctttccatgtgaagataattctaaaatcctaccacggcaaggacgccactgacgtttttattcgagggagaaatactctacaatgtttgattttatgtacctctaagtaggtaggttcctggagctgcagaagaattgtcctatacctcactttaaattaagatttaattgtgacaggcgacaagggtcacgtgtctgtccttaaaggtgtctgtccacctttaagatttaattcagtgccttgggtgtgttgtttttcatatttgtggaccaaagtgattgccctgagtactggagaaagcagaatggctataccgtagttcatcaaatagctgtcagcctaaatatgccccaaatagtgttttcttactgaggcttcattttggcctaaatcttgttccaagaccccagtcttttgacaggaaagccttatatgccaagtatcagcaaggaaacataattattactaaaattgaagcaggtactattaaatcttttcatttcaatttggaaatataagatgaagggtttaatattaactcaaacagtcagtttcaactagatcactgtgttttacagctaatagcattaagacatcactaatacagcttctcaaaaaacaagtgtggtattatagttagtccaagtagacagattctacaatgatttgattatatttatatgttttcttgcaaactccagtggtatttctcaaaatttttaggtgtcaacatatggtttcaatttctctgaaatatatagcatagcttgttctcagagaaaatgctgccaaacaggacttgtaaatgtatcttgaggtgaaacttaacatctcgtcttttcctataaggctccttggctaatgcctgcataaccgccgcagatggaaaatcacaccattacccaaatgaagttttctcaaccgaaaagggaaacaggtttccctttcttatacacactgacctatactctaacagaatttttttagtataaaaattatagacactcacttaagaattttgactataaaaatatagacatttcgcttatttaaatacttgcctttgtgataaatttcataacaattcagactaaaggaatcaggctaccaaaattaacaaaatcatttattttcagtagaaaaaaattgtcaaatcattcttggcatgctgtagctccaaaaacagaaaagaaaaaaaaaggttttgtttgatttctgtattgccagaacttctgattatgctgtatttcctggtgcactaaatatttttaccgaattatttatctttatggtacatttcatattcactatttgtgtatttacttaatacacatttaaatgttttctatgtatttttagcgtgtgcatgggtatggacatatacatacataatatgtttatatctgtttttataaaaataaaactctgtaatgtaaatttaaaaattcaatttcatacctgcatgttttgtctgtattataaccccaatccaaatagtggatgaatctagttttatacctactaacatgttgtagacattttctcaaataataaattatcagggaacatgaagtttgtttgtctcataggttttgtatagcttaagccccggtataatatgtgcatacccattattgataaagatggaacatggtccatataaggaaaatatttctctttttttgaatttatggaaagaaggtaatattaatgagaaacagggatatttttatctatgaggttttcccctaagttccaatgattatcttgaagtcataaacaatccagcagtccattaaaccgtatccctaaattattcaagattttcatggttggccaccttcacactattattattttgtctcataccaatgatgtttataaaatatgtatatagaaacagactaaatagaactagacaatgctatgctccagtgagaccagagctcactcagtgcagttcccttattgatactaggaacgaactgcaagaagaccaaaactccagttacttttattcagttataaaagtaacagagactatatgtagaaaaaattaaaaaacataaataaaccaaaaaagacattaaaacatatatgtcagtacatcaaaatgtgcaactattaatacatgtgttcctgtcctcttttaagcaaactacatccataacctacgtattattgttaaagtatacagagggatcagtaacatttttccatgccaataaatacatttcagggtttgtttgcttgcttgtttgttgcagtatcatgtctaattaattaccggtatgtttctggaacacactaagttgtatttacaaaaacttggacttttagtttatttctgactttatagttattttcttatttttaaaaacttacaataaaaagattagtatagaatgtttactgtgtgtccaatacagtgcttagtgccctgcttgcatgatgtggtttagacacactacaccttggagccaaatacaggtcactgccaatttttgtaaagccacacccaatttgtttacacatttgtctatggttgctttcaagttacaatggcagagttgagtagttgcaaaagaaagaccatctggctcacaaaacctaaaatgtttactctctggctcttcacagaaaatgtgtgttcacctctgatattactccaataggacttgcagttatgatggaaatattctatatccactctttctcatatgggagccagtatctatacgtgactattgagcacttaaaatgtggctggtgtgactgcaggcctgaatttctaacctgatttggttttgattgatttaaatttaaatttaaacaccctatgtgtcttgtggctcctctaatggatgtcacaaatatagaggttctagtctgtcaaattccaaagcccatactcttaatgatgttatgtatgagaatttctggaaggctaaaatttagtaggtcaatatttagtagctacaccttttgtagttgccattatttttgcactgaatttcagtgaatttagcattatatagcaagtaatcaaagctgttcttattttaacaattaaagttattaacaataaaagctacttaaaataaccacatgaaaggctgaaaagaaataataacttttttcctgaacaaaatcagagttatattttgcaacactcagatatattgttacatatgttgctactagtatctgttattctcatttatttaatagaataactattcatagaaaacagacaatttcggggttgctcccagaataataaaccagagaaatatgaaatgtttttcaatcagctttagctttaagtaaagcagattattttagcaaaaaagctgtttttttttagattcagttattaataaaaccaaaaaggttgctttttctcctagattcaggtactaacatgacttgttaggagaagctgagaggaggtagattaatagttattttctcccatcagcaaccagggctacattataatttttatgattctgggcactttgtcttaaacatgcccttcttccattaaaagagaaaaggaaggagggaatgagggaaggaaggaaggaaggaagggaaagaaagaaagaaaaagaaagaaagaaaaaggaagaaagaagaaagaaagaaagaaggaaggaaggaaggaaggaaggaaggaaggaagggagagtgggagggaattagttcattcttactgctaataaaaacatacctgagactgggtaatttataaagaaaaagaggtttaatggattcacagttccacatggctggggaggactcacaatcatggtggaaggcaaaggaggaacaaaggcatgtcttacatggtggctggcaagggagcttgtgcaggggaactctcatttacaaaaccatcagatctcatgagacttattggctaccacaagaacagcatgggggaaactgcccccatgatttaattatcttcacctggccctgtccttgacacatggagattattacaattcagggtgagatttgggtggagatgtggccaaagcatatcagggagtaaggaaggaaggaagaaaagaaggagagatggagggaagaaggaaggaaaaaaggaagggagaaagggagggttgaagagaggaaggaaggaaggaaggaagaaggaaggaaggaggaaggagggagggagggaggaaggaaggaaggaaagaggaaaggaagtaaaggagggagggaggaagaaaaaagagggatggggatgggagaaaggaagaagacggagggaagaagaaaggaaggaagagagggtggaaggagggaagaaggtggagggaggaagggagcaaggaaggaaggagggagtgagagaaggaaagggagggagggaggaaaagaaggggagggagggagggaggaaaagaaggggagggagggagggaggaaggaaagaaggaaggaaggaaggaaaggaaagggaggttggccaaatcttttcaatgattaagacacagctaccatgttcaggagaggctgtgtgatgcagtgggtagccccaggcactgaagccaggctactctggtttgaattctcattgtctcacttcacagccatgccttgggcatattaccactccttgtggagcctgtgatttcatttgtgaaataggcattatagtccctagtcccatttggtttttgttgaggcataaacaagttataaatgtcagctctttgaaaagtgcctggtacatacatagtaagcactgcctaagtgttagctcttattgttagtaataccccttctgcagatagaaggatggttgcaacacaagcctggcccctgaggagctacctccaattcaaggatctcttccatctcttaggctgacttcaactgatagtcgtggctgattgggttgattgttggaaattctgaggttgttattcaagttcagagaaaaagagcgtcttcagaacacaaaaggaatgtggtcacatgtatctgatgaggtgcaggaaaagctaccccaaaatatggcactttggtatttgagaaaacagcagaagcaggaaggccactctcagcttacctccacctttctccccaaagcaggccaaaaaacctaggaaggtgtccatctggccttcttccttctcctgttgttaccagcagtgagtctgtatgggtctgcagcaacctcagctcttgccacctcagaggaaggaatccgaccaaggggcataaggcagagtgagagaccaaggcaagttttagaataagagtgaaagattattaaaaatttagagcaggaattaaatacgtaaagtagatgagggccaagtgggcaacttgaaggatcaagtgcatggtttgacctttgccttggcgtcttatatgctgctatgcttccagggttgcattacttctcccctgattcttcccttggggtgggctgtccacatgtacagtggcctgccagcacttgggagggtccacaggcatggtgcgtttactgaaattgtgcacacgctcacttgaggcatttttctcttaccagtcatgtgctcttagaggaaggtcatataccagttaaactctacgattttgcctcttagtgcacatgcttgagcccacttgctgaactcctgagatcttttcaggaagatgttgaccatcaatttcagttgtttctgtctatttggagactgccttttcctggtgctggctgtgaccaattattattctagagagacaacttaacaatagcctgaccatcacctgagggtcgcctgacattcctggtgtggagggggccttttctaccctgctcatatctgacaagctacctactgtaataccctaaaaaccctcatgtgtcagatgccctgatctctacttccatggaagaaatgtcacacagagacaccaataaggatgggaataatcaggtcttgctaagctccccaaagtttgttttcattagtatacacccttttatcctccaatcatatttctgcataactgtccataaaagtacaatttttccttatgtctttgagtcttcatttctgaagcctcccatgtgaaataaaatttctatgacataaatttgcgtgatttttttcttgtcagcctgtcttttgttatgggatctcagccgtgaaccttgtgatgagtgaggaaaagatatgactttttctcccctgcatatcctcctttatctgtagtctaataagatgaagaaaaaacaaaattaaccttttagtgtgttatttttacaagctaatgatttcccttaaaacgtaggtgcatggcctaacgtgatttgatactctcattcatacggtttatctttttttgagttatctgcagtgagtgagcattcaaacaactatttattgcattttttggcatattttcttgtcagccaggacactgggttcttgaattgcaacaaacaaacaaacaaacaaacacaacaataacaaacagcaatattgtaaagaggatgtgaaagaacaataattgatactggtaattgctgtctgcaatcaccactgatttttttggaagaagggtcagcttttgttagactcattcatttcttacttgactttctaaagttctgatttttttcttggaaaaatactttgctttataatgacatcaaagcctgtttctatttggctcagtctgccatgagaaaatgaaggcaaacaaatgctttataagtgaagaatgaccgaaatagcctaatacatcagcgtaaccagtaataaatgttgtctctggatagccatttacaaaattactgacaatgcaactcttgatcagaaaaacaaatatataaggcacaattcttttaactttaattaatcatacataaatctgtggagttacctggccttgaacatatgcacatatgtgcacatctttatcaatctgcgtacacatctccgtattttatttctatataggtaaacatctgctggaactatatcattctgagtttacttgaattatagcaaagatttagacatttgtttttccttttccatttaaaaaacattaaaaatggaaaattcttaccacaaaattgatatttatataaatggattttcttcatacgtaaagaaacggtcgcaaataaatcacttgatcttaaaatgtattctttaactacaataactaccctccacatccggatttacattttgtaactaattcattagcatttcttttcccaggttagcaaaataacagtaacatctcagtattcactttcctcataagatataaacatatactagaactagactataatttgatttttattaaattcattctaataagtgaagagttattttgacaaaaacacatgttacataaatttttagagagagttaattggatgtggtctttagagcattaattagcagaaaatagttattaaatgcacatttcttgttcaaaataccagaaccaaagtgtagaaacaattctacagattgtcacacaaatcagtttcattttaaagtgttttcatcacctttcctctgattttctagtttataggtattggaagaaaagcctgtgggagagggagaatgtgtgtaatttcaatcttaagtcaggtattattaacattcaagtgtattttttaagtaatttactcattttttattttatatatcaatattacactggatattctttcccatgctccttttattttctgaactctgtaatacaagaactttcttatgtcatcaaaacaaacaaatgaaaactaactttgtaaacagtactggaatggctatatatgtaagttccactggtctatagttggagtcagcccattttttttctgtaaatgaccagacagtaaatatgttctgctttgtaagccatacggtctctttaaaactactgcgctctgctattgtagggcaaaagcagccactcactcaacataaacaaatagatgtggctgtgttccaattaaacttatttgtggatactgaattttgaatttcatataatattcacatgccacaaaatataattttttcttttcatgtttcttccaaccatttagaaatgtaaaaaaccattcttaacttataagccatacaaaaattaggaggctggctgcatttggatgacccgccatattggatggctttggactacagcttctttgacttgtaacatctccaagtctctcctaaactgatccccaagggttaggcttaggttgctttggtttacccattttgtttccacatcagaccttattttattcaagaatggtgtgaccggttaaacattttacttttaaggaaagcatgtaatgaactgagagattttgctacagggatttctaaaaattaattgtaaaattgtcatctcccagagtctaaaatcaatctgatttatgaatatttgcctgagacagtttgctttttaaaaatcagtaattataatttgttattgttcttgcagatgattactctcaaaaccatgatagataataaagcataagatattctacttcttgtatagggtatttcgcaaacttaacaaaaagaaaaccagctgggcatggtggctcacacctgtaatctcagcactttggggggctgaggcgggtggatcacctgagatcaggagttcaagaccagcctggtcaacatggtgagacctagtctttacaaaaacacaaaaattagccaggcatgatggcgagtgcctgtaatcccagctactcagtgaggattgcttgaacccaggaggcagaggttgcagtgagctgagatcatgccattgcactccagcctgggagacagaacaagactccatctcaaaaaaaagaaaaaagaaaacctacagactactgtgaagaaaaccaacaaaagcaccattagcatagcttttatttcaaaatgcaaggcctgggaaagctgcaaaggagcattctaacttggacgaaaagactggaattataatagtccattttcacgctgctgataaagacatacctgagactgagcaatttacaaaacaaaggggtttaattggactcacacttccaagtggctacagaggcctcacaatcatggcagaaggcaaggaggagcaagtcacatcttacgtggatagtggcaggtaaagagagagcttgtgaagacaaactccccttttaaagcagttagatgtcatgagacttattcactatcatgagaacagcacaggaaagacctgcctccatgactcagtcatctcccaccaggttcctcccacaatacgtgggaattatgggaactacatgatgagatttgggtggggacacagagccaaaccatatcattctgccctggcccctcccaaacctcatgtcttcacatttcaaaaccaatcatgccttcttaacagttccccaaagtcttaactcatttcagcattaactcaaaagtccacagtccaagtgtcatctgagacaaggtaagtgtcttctgcctataagcctgtaaaatcaaaagcaagctagttacttcctagatacagtgggagttacaggtgtttggtaaatacagccattccagatgggagaaactggccaaaacaaatgggctacaggccctaagcaagtccaaaatccagcagggcagtcaaatcttaaagctccaaatggtctcctttgactccatgtctcacatcaaggtcacactgatgcaagtagtgtgctcccatggccttgggcagctctgcccctgtgccattgcagcatatagcccccttcctggctgctttcatcagttggcattgagtgtctgaggcttttccaggcacatggtgcaaactgttggtggatctaccgttctggggtctagagaatagtgaccctcttctcacagctccactaggcagtgctccagtagggactctaggtggggactctgaccccacatttcccttctgcactgccctagcagagattctccaagaggaacccacccctgcagcaaacatgtgcttgggcatctaggcattttcatacatcctctgaaatctaggcagaggttcccaaacctcaattcttgacttctgttcacctgcaggctcaacactacctagaagctgccaaggcttgaggcttgcaccttttgaagccacggccgaagctctacgttggcccatttcagccacagctacagtggctggaacacagagcaccaagtccctaggctgcacacagcatggggaccctgggcctggcccacaaaaccatttttcccttagcctgccagcctgcgaggggaggggctgctgtgaagaccactgacatgccctggagacattttccccattgtcttggggattaacattcagcacctcattacttatgcaaatttctacagccagcttgaatttctcctcagaagatgatgggtttttcttttctattacattgtcaggctgcaaattttccaaacttttacgctctgcttctcttatcacaataaatggctttaacagcactcaactcacctcttgaatggtttgctgcttagaaatttcttcctccagacaccctaaatcatctttctcaagttcaaagttccacaaatctctagggaaggggcaaaatgctgccagtctctttgctaaaacataacaagagccacctttgctccagttcccagcaagttcctgatcttcatctgagaccacctcagcctggaccttattgtccatattgctatcaggcttttggtcaaagctattcaacaggtctgtaggaagctccaaactttcccacattttcatgtctttttctgagccttccaaatggttacaacttctgcctatttcccagttccaaagtcacttccacattttcaggtatctttttagcagcaccccactcctggtacaaatttactgtcatagtcccattttcatgctgctgataaagacatacctgagattcagcaatttacaaaagaaagaggtttaattggactcacagttccacatggctgcagaggccccacaactatggtacacggcaaggaggaacacgtcacatcctacgtggatggtggcaggtaaagaaagagcttgtataggcaaactcccattttaaagccattagatgtcacgagacttattcactatcatgagaacagcacaggaaagacctgcctccatgattcagtcatctcccaccaggtccttcccacaatacatgggaattatggtaactataagataagatttgggtggggacacagagccaaaccatatcgggaatcttttattgggcttcagcaggtggtttctttcagcaactagtttctagaatagttggtgcaggatgcttcttagaagagggagaaagtattcctgtgcattagtatctagggaagaaggagaaactattcctgtgcattagtatctagtgtgggagcaatttagattttatgaataagggcaagggagaagagctagaggctaaggccaagtgcaagaggggtcagggagggttgttgtgggacacacatgagggccattgtgagaaatgctcagtcacactatgtcctagtaatctattatgcagtattcatgttagaaacctttataataaagccatctaatagtactgtatcttttttttcccattatcactgttaccactggcaaatccatacagatctgtagcaacctcaactcttgcttcctcagaatagagaattcaactgaggggcataaggcagaggagagactgaggcaagttttagaacaggagtgaaagtttattaaaaagctttagagcaggaatgaaaggagataaagtacactcggaagagggccacatgggtgacttgagagatcaagtgcactgtttgacatttgactttgggttttacgcatttgcatactcccagtatcctgtgtccatgattcttcccttggtgtgggctgtctgcatgtgcagtggcctgccagcacctgggaggggagtatgcacagtgtgttttctggaattgtacgcatgctcacttgaggcattcttcccttactggtcgaatgtccctagaaggttatataccagttaaacttcaccattttgcttcttaatctcatgcttgagcccactggctcaactcctgagatcttccctggaagctactgatcaccagctttgatttttctatctactgggagactgcttttccctggatctggctgcaacaaattagtattttagagagacagttaacaaccacctgacggcatctgacattcctggtatgtgtgtggtgtgggagctctctcctgctctgctaatgtctgactagctacctactgtaacatctgtaatatcactgtagcataattattgcgcctacttaaatactatataaaaagttaatctattgataatatatgacaggttaatggaattaattcagatgcagttgatcagatccatgatgcagaaatatgtcattaaatattatcaaatcctgctaagaatgtggaatattcaatcaactatttttcccaaggcaattaaataacaacaataaaagccttcctaaaatgcatgatggccttgggacagaaacattaccttgtgttagacttataataatattattaactaggtatcaaatttcttgagtatagagataggaaaactgaaactttgagattttaagtaactgagatcacataatcaacagaatgaaaaatttgaacttgggccagtcttgaaccctgttatatttttaactattaagttcagagggttaagtcttcattgttcaccgcagtgatttaaaactacttgaagattaatggggcctaggacatgctactccaaaatatggcaccttgacatttgagaaaacaacaggaacaggaaggccatctccccttccccttgccattctccactgaagcaggtcataagagcctcattccaggggtactctctctacacctggatgaaagaaatttctctcttaagacatagagacacagagaagaatctgaataaaaaggccttactaaatctctccctaccacccccagtttattaccattagatcatgtcgttttctcctccaatcatatttcactcttcatcaaacctaagcataaaaatacttatacaaatttatctattttggggagatcttcatttccttatgaagtttcccacatcattaaaaaataaataaaatttattctattaaataaatgtgtatgcttttcttttgttaaactgtcttttgttgtagaggtctcaaccataaagcttgtaataggtaagaaagagattttttttatcccctacaagatcatgtttgcaaaattcatgttctagaaaaatgtcattttctagcaaaataattggcatatatgtaaacaatagtaacaaattcacaatatgtttaaagatgtctttagtaattttattatttttttatgtgtccccccaatacataaaaccactttccccaaatgtaacattctacattatggaatgatctgtccttgagagaagattcaaagggagaacctgcagtcactgttctttttccctccaggattaagagccaaactctaacatttccttttggtttgctaagaagaagggggaaaaaaaaaactacccatgagagtacattgagacaacacaatttgcatatcttaacagcctcccatggtgccctgcaagcaaagaacagttgaaggatattgagttccttttacacagcataaccagcggaaattaccaccgatgttaatttgaaacagaatgagatagccaactgaagtgccttgaggaagtatacaaagagggccttctcttgttcacaaggtgctgacagtgtgggtgagagtccatcctgtgcagctgatgtaaggaatggcacatccttaaatctcaacacctgggcagagcttgggagattttgaaagaaagctagacagacggtttctcataatgacactgcaaaaaacccccaaagccatctgcagctggctcacttaggaaccaagtttaaagaaaaaaaatctttttttagaaaggctcatttatcaatgccaacaaagttaagccgcttaataaatcctaagttcccattttgggtagatatatttttacattatcactatttccgagaactctgaagttattggctgttgtacataatgatagggtggatcaacctgttttaatcccaagtgcagtctgaaacgagagaaacaccagttcaaatgtaaaccagttgaccattccttacagaatttcattttctatttgttttcactattaaaaatatcatctcccttcaatccacatgaagttcaaaatggaacacattaggaatattgcagacaagcatctaagataaactacccttctgtgaccacaactccaccatcaatctgcttgtctccccaaataatcagattctgtgtattcattaaactggtgatcagtgtctcaaagatgcttcgattaaaatactggcttagagaaacaggaaaatgttcttcctaagtaatgagaggcatattggggaggcagtacaggaaagaaaacttattactttagagcaaaatcaattttctctaacctatgacatatagcctcttaacacataggatgtcatgaggttaaacagaatgaacatgatataatggcattgtgtaagtgtacaatgcaaagctattcattataaaataatttgttatactataggttcagatacactctcttggaagccacctaaaatcctttttagaacaaagtgagataagaataaataatgaatagaaaatacttccctctggttgtatcatgaattcctggcctacataatttatgtacattggaagactacatttttttttaaaaaaagagaacaaaaataaaacctttgagtctcacccgagaagcacttatcattttttaaggttcagtgatatgcttgtggcatgagtagtcaatcatacacaaaagagcatctctaactattatagaacatgtgttaccggaacagggtcctgatccagaccccaagagaagtttctccaatctcaagcaagcaagaattggggccgagtccatagagtcaagtgaaagcaagtttattaagaaagtaaagaaataaaaggatggctactccaaagacagagcagcggcatgagctgcatgactaagtatagtgtggttgtttcttcattatatgctaaacaaggggtgggttattcatgagttttctgagaaaggggtgtggagttccaggagctgaggactcctctcctttttagactatatgcggtaacttctggactttgccatggcatttgtaaactgtcatgatgctggcaggagtatcttttagcatgcaaatatattataattagcgtataatgagtagcgaggacaaccagaggttgtttttgttaccatcttggttctggtgggttttggctgccttctttatcacaccgttttatcagcgaggtctttgtgatctgtatcctgtgggaccagtcctgttgacctcctatcttatcctgtgataaagaatgcctaaattcctgggaacacagcccagtaggtttcagcctcattgtttaaaattaatatttatctttatttcaatagcttttggagtactagtggtttttgattacatggatgaactgtatagtggtgaagtctgagattttagtgtacccatcaccggagtgtacattgtacccaatatgcagtttttttatccctcaccccgctcttaacctctcccccaccctgaagacccaaagcccattatatcactctatatgcgtttgcgtagccatagctttgctcccacttataagtaagaatatgtggtatttgttttttcattcttgcatttctttacttagaataatgacctccagttctatccatgttgctgcaaaagacattatttacttctaaaaatggacaaatctagaggcatcacattaccagacttcaaattataaggctataattaccaaaacagcatgatactgatataaaactagacacatagaccaatgaaacagaataaagaacccagaaataaagttgaatatttaaaagcaacagatcttcaaaaaagcatacaaaacataaattgaggaaaggataccctatttaatacatggtgctgggaaaacttctagccacatgtagaagaatgaaactggatccctatctctcatcatatttaaaaaatcaacccaagatgggtcaaagacttaagtataagacccaatgccataaaaattatagaagataacctaggaaaaactcttctggacattggcctaggcaaagaattcatgactaagaccttagactcattatacccagcccctattcaagatgaagttactttggttcaaatgcctctgacacataaaatctcagcctgagggacaatgaaattcttcagagaaaggaaacagtttaacaagacctaataagcatggaagaatgatttaacctcaaagatgggatggaacgggtgttgagaggcagaaatggaggagaaaaaaaacctttgagataagatttggagacagaaagaaagcagcacacatgtctgagactgtctattgcaggagatgaaaggaagataaaaatacaactctggccaggcgcagtggctcacgcctgtaatcccaacactttgggaggccgaggtaggaggaacacttgaggtcaggagttcatgaccagcctggccaatatggtgaaaccctgtctctactaaaaatagaaaaaatagccaggcatcgtggcacatgcctgtaatcccagctacttgagaggctgatgcaggagaatcgcttgaacccgggaggtggagtttgcagtgggccgagattgggcccttgcacaccagcctgggtgacagagtgagactccctctcaaaacaaaacaaaacaaaacaaaaacaaaaacagctctgtaagaaagaaatgaaagttttgcattaagaatggaaggaatgagttgaaagaccattgttgtttgtgtgcgcatgtttctccctaagttctctacttcgaaaagtaccataatacaacgggaatgcttggagaagaaaagcgtatccttatttccatttaaacttcaccactactccctgtgggaggcaatatggtctccatttaaggtaaactgcgagtgccctttaacaaagatggcaccatcaaggtggcacatcttttaaatagcaaggctctaggatttgaccccagatctaactaaaaaatttcagaatgattttattctacatcaaatatttgtcctcaaacattgaatgatttcgagatgtggagaataacgtaaaaccttgacaagtaaggtggatgcagtttgttgatgatattgcaacagatgcaagattttttcatgattctgtaacaaatatttttttggtttttgttttttctttttctttttttttttttttttttttgagatagagtctcgctctgtcacccaggctggagtgcagtggtgtgatctcagctcactgcaacctctgcctcctaggttcaagcgattctcctgcctcagcctcctgggtagctgggactacaggcgcgtgccatcatgcccgactaattttttgtatttttagtagagacagagtttcactgttttagccaggatggtctcgatctcctgaccgagtgatctgcccacctcggactcccaaagtgctagcattacaggcatgagccaccgcgcccggcccttggttttgtttttcaaatgcctaggaaacatgcataaatattgctaaatggatatcttttttaaaaaatttgtgtaattctcctacagtatatttacatttatttttaaaactgacttttagcactgctataagggatgttatgtactgcgaaaaggcaatgagatggttgcataaatcaatagtacatatttgtaagctacgttctgcctagtatttggtatgcttctgagggaaaaaatatcacaatatgagacatggttcttatttcaaaatgagtttcagtctcctggtagttgaaagccaatctatacaggaaaaccagaaggcatatttaatcacacacaatcaagtgttttattgttattatgactactattagtaagagacttctgtgaagaagagtatcaagaaaagctttgaactaaaaacagaagagaaaaaagaatgataaatatttagtattaagtctctaacatataaaaaatttggttaatgaatgaataattgggaaaataattgagactagggagcaaaacaaacaaattatgcaagttgtagcatatgggggaactgtgcatctggctagagaaaaatgtttattttgttcaaattagttctcgacagataatggaaggctttgatgtccaagctaacgaactgaaaatgaaagtagtcatttctatcttcttaaagtttgatatggtttggctgtgtccctacccaagtctcatcttgaattgttgttcccataatccccatgtgtcatgggatggaccctgtgggaggtaattgaatcatgggggtggttaccctcatgctgttctcaagatagtgagttatcacgagatctgatgattttataaggggctcttcctcctttttcttggcacttctccttgctgctgccatgtgaagaaggacgtgtttgcttccccttctgccatgtttgtaagtttcctgaggcctcctcagccatgctgaactgtgagtcaatcaaacctctttcctttgtaaattacccaggctcgcgtatgtctttatcagcagcatgagtacagactaataccatgttcttagagaaccttgtctaattacaatattctatgatcctggatgtcatacaaatccctggtttttaaagtctgaatagttttctcccacaacttgttttaaagagtgaggacatactgggcacctgattctgaaaacacctcattcataataacacactacctatgtgagataaaaatgtaaatgagctgactatgtttttttattttgttctgttttggtgctactaaaaggctattcttaaaactgtttatgtacatgaacaaatgtttaaatttggtgaaagttctgcctgttcaaaagtgttggaagaaaactccatctcatcacaagggtcacatgtggagtaaggttttgaatttggctgctcatcttccattacctggctaatgggaaattatgtaaggtctggaagatattttggaagcctcttctatgtgtggccctgaaatacttttggggaactcaacaaatgcctgttgaaagaagaaagtaacaacacaaattagggtaagcaaattatgtgaataattcttaggacctttgtgtaatatcaaagtttagatttatcaattatggcaaaattgctttgggggtgaaactgagaaaacaattaaaaaggggaaaaatgttgctaggctgtgtattggacaaaattgtgctgccacatctgtccaacggaaacccaatcttggaattactgttgtacataaaatgaagacaataacatttaattacttggctaaaagaaaatgccacagcatgggaaaataaaacttctcaaaataaggatcagattaaaactgtgggctctcacctactgcttcagtggctcctgtgagctccgacagctttcaaattgcttaaatagttagtaaggtgattgtaacattgaccagtaaatgacataaatctagaattaattataaggacttaagtaagcaacaagaaaggggttcactggatccaggtttcttgtgaaatgtcggcattaatgaaattttaatcagtttgtttatctaaggaagaattatttgcatatcatattgcagaaaatatagtactatagtaaagttacctgactttagactattatttaagtgaatcacttgtatcttaattttcttagacaatttatagtctttggtttttatcaggcctgtgtccaacttgtcacgttgactgaaattaagcaatacttaatgagatctctcatgggacctctctcatattttacagaactgcccatctttctcatctccacacctcctgaaatgtcattcttccatctaatttggagtaagttgttatttatggattgttttaaatttatgaagtggtgaggggtgttatagttagctggatgtccctgtgaagttccacagatcagtggtgaagccatccatttaccaattgacttttaaccttctctagctgacaaaatgtgatttattttcgtgcaaagaaaatgagctaaatgtttgactatagccaggttttttcttgtagcctgagtatattgcacctgaaaatcagctatttcctcaaaatataacatagatcaaggttagtgttttccatgaaagaaaccataggacattaatggttacaggtggaatatgtatttttattgcactttatgttggtaatttccaaatcagtttccatcttggaataattgttttatatgcacattataacctacaacagtactaagattttcttcactaccaaaatttattgtcttccggagcttatcctgaagcttagtataagtagcattcaaatagaaatgagatagagtaaaagagatttgcttcgtgagaacggaagtctatatatgggattaaaagttatataaattattatttgagcaaggatttattgaaacctccaaactcacttaccattgtaccaatattgttttattaagaatccaagattgtacaatgttagcatatttgaatgcttaatggatcctgggcactgttgtaaatgctttatgtggcttatttcctatttagtccttttgacaactttatgagataggtgcaattactatgcaaattataaagagggataaactgaggccttaagagtcaaaaacagtctggaggtacgaccactaggaagtagcatgctgtatgaataattttttttttttcaatactttgctttgacatgctggagccttgcagacccagggagggactgcaccttagagggctagcttagctagtaactagagatagcaaacaacttgcttgtgtgcacacctttgatatgcaaacaaaccaatccagagtctataatttaaccacctcctttatcaaactttcacacactaagtcaacattccctctgacataaattaccccagaggcaggtgctggacaactagtgaccactcccatagcccatggcctgccaaaattattcaaactctccaatcctaagcctgctcaactgcttcgcctgcctcagccttcctttctgtggaaatcacaataaaggctcgggcccatgctttccccctactccttctgcctcctgactgaccctggggcttcgccatatagctgcacatggtatggagtgtcccttcttgtgagaactatgagaaacaaagtatatttttaatggcaactgtctcctgacctgttggcctctccatacctgaattaaaacaaaaagtctaagtacactttacaaaatgtacccggagttgagccaaggccctttggctgcacatccccttcctctttttaaccccaaggatattcttcttcctcccttccttcttccatcttccctctccatcttctcttcttctcctcttctttatttttttcttttcttcttattctttcttcctcttttcttgtcttcttccttctcatcctcctattcctcttcttccttttccttctcttctttctctccttctccttcttctccttattttccttctccttctcctccttctcttctttttctccttccttctcctcctccaccttcttctccttctcctccttctccttcttcttttcttcttccaatttgcttttaatttaaaaactgagatttacatgaagtcatagaaatgcacaaggaggttttatgcacccttcacccagcctcccccaaagtctacaccttgcctaactagaatacaatttaacaactaggaaattgacagtggtacaatccacagaacttattcttgttttattagttatacaggcacttgtgtgtatgtgtagctccttgcaattttatcatgcatgtagcttctataaccactaccacaatcaagatattccactatgccagcatcacaagctttcttcccattacccctatatagacatgcctacttatctccattcttaatcctctggccccaggaaacaactgatttgttcttcatatttacaaaatgttatttcacaatgttatataaatggaatgatgcagtatgtatcctttcgagattggctttttttcaccgttctcatttccttaaggttaatccaaagtgttgcactcatttcctttcattgttgagtaatattcaatagtaataataatccatccattgaaggacatctggatagtttccagtttgggggtgtaataaataaatccgctatgaacatttgtgtataagtttctatatgatacattgatattcgcaaggaaaacacaactcctgttatccacactctggtattgccctttccccttgaatttggagatctctttgaatcatattagccaagggaaggcagcagcagtgaccctgtgccagtttggagcctaagccttaagaagcttctcttctggctttttggaagtcaactttcctgataacccaatcctgtaaggaaacccaagctagccacacagagagatttaagggagaagaaccaagcaagccagacataagtatgaaccaaagctactgggtcacagacacagctgagtcccagggaacagtcattatcaacctgctgttgaaagttgaagccatctttaaagcatatccttaagccattccaggtgatctcattgaagcaaacaagttatgtttgcaaaatagtgaccaaatagcaaaatcatgagtacataaatagaatagttatcattttaaatcactaagtttgtagaaggtttgtcacacagcaatacataatgggaatggaaataacacatcctggtatatagtaggtccttggcacatgctagttttttcattaatttgctaaaattccaggctcttattttaaataaatagttattgactacatgcaattaaataggtaaagtgcaacgatgtatattacttgtagcataaacatatctggtacctgaatagtccagaaatgctatggatcaggaatcacaggagctaagatcagtttatagctctaacactaccaggctttgaacatgacatatcatggacaattattagaatcagaaaaaacaactgctataaaatcattttatatgttgtaaagcactaaacaaatatagggtattctgaagtgacttgccaacaatgtagttgttggttgataaataaacattaatacaaataaaacacatatgcccattatatttaaggagcattgaatttataccaccaccatagtgtgtttacatattatacagcaagtgttataatttcaataatttgggacctgacaacatctgatatagaggcagacatgtcttttcagaatttgtttctaagctattattggctttctttcatcatttagcccaaattaagtgttggttaatgtggttacattttactggagctactaaaataaggttacataaagcagaagatggaaataaaagtttacaacaagcttcattctgctttgtttctttgaagctcagtggaaagtatgacagcattgcacattcaagtctttgcatagtagtaagcaaaaaataataataataattataaagaacataacaagctggaaggaaaaagaaaaacaagccagaacaaattctagctgttgatgatttcctaaggagatcccccttcatggtgcatgaagaaaagcatcataaattgtgtccaaaatcatgttttctttttgtctgaaacctggaaaattcaaaaagtaagtttctttggatttatgctgccctagataaccaatttgtggccaatttttcttctcacctaatttttcagttgttttgggataggttactcttcacatgtatttgacgatcctccaagttgattaaaagcaagacagagacagagcacaagtaaaggccttcagtctcatttagtataaaattcatttcagaaaagcatggctacaaaacatagctgaatgaagaaagacattaggaaaatttttaaaaagctgccatacatatgctatttggggaatttcccagtgtttggcccatcgctaggtccatttctcctttatatgcattcttctgccaaattacacagtataaaattgcttttgtttggatcttggcctgcaacttaaagtgtctttgagaagacttaaagctagaatttatttttctaatatatattgatagtaaaaatgagattgtagtggaggacaagaggtttaagaaaaatatttgaatctgaattagaaaatttcaaattcattgctcagtggagaatactttaaaaacagttcaattacaaagcgcttaatcaccagtttatctatgctacacctatattaatcaagcaatcttctaaacataaattgcgtcaaatgagaaaagctaaatggttaactaatcaaatatgtttataactttgaccaaaaggctctgggtggcatataattagatatgggaattagaggtgatggtgataattgattcattgcctgagctttccacctttaaaatttatttttgcatacgtaggccttacaactaaatcacagtttcgccatctttgtcagaaaaataaatgtctcaaatgactatatttttaaaaaatacaaataatggtgaaactgaggtggtgaacgtttaaaatgcaacaatttttttttttttttttttgagacagattcttgctcagtcgcccaggttggagtgcagtggcgcgatctcagctcactgcaagctccacctcctgggttcacaccattctcctgcctcagcctcctgagtagctaggactacaggtgcccacgaccatgcccagctaatttttttggtatttttagtagagacggggtttcaccgtgttagccaggatggtctcgatctcctgacctcgtgatccacctgccttggcctcccaaagtgctgggattacaggcgtgagccaccatgcccggccaatattttacttacaggtttacaaatctaatacattgtgaatataaacttgacttcgatttttttaaaaagttcttctagatttaagatatatatttaagagtagtctagattgctcttggatcatatgctccttagatactaactacttgtacacacaatattacatatagtatattggtacagagagtttatgtgagcacttggcaacaaaatagtcaaaatttagatatgtttatttaacttaatgagactatttagttggaaaaagaaagcaacttttgaagagtaaaaattgttttggattaactatttaaatacatttttaatgagttataatattttcacacatggtttttgatcataaatattatggctagatagtctgttctgttcctaagattatttaaaaactaaaactaaaacaatcagatgagcaaacaaaaaaactatacaccagtattttcttctaatccttttgtatttttactttctaccatttaaattatttaacgtgcaagttaactttatgtgacttcagttattttttattcctattctaaccaaatttctaattttatattcaaataaaacacaatgtttttaagaatttgaaatactacttctactacaaaccatataactttatcaaataccacttttgccacataacatcttttcagctcatcttccgagctgaaaaggcagctgactgtaataggaatggcaacttggctgaaaacagaaatctctccctttcagccccagctctttttctgccacaattgtaggattattggtgaaaccactcagccactgtgacacatgcacaaatctagacacgcaagtgaattaatacccttgatcaaaggcaatcccagaccaatgttgtacaggagactttggataaataaatacaccactcttctgttccccaatggagaagatgtatgctacatggctccttagagtgtcattagtgagaccaagccccagttgtccattgagttaccagttaagtaagagatcttaagactgcattttcctcttttcttgttccggtcttccaagttccctgctcttattctttggaataattccctacatgccagaagctatctggattcaagcctttatctcagcctctgattttagagtaaaccctagctaaggaataaatcatcatttattctcatttctatttatttcttctattctataccagttatataccctttcatggttttattacatattttagtatctggtaagaccactttacttatgttattgttttcaaacaaccctaggctgctttcataaatgtattttcccagttaactttgaaccactttggcaatttcaaagttctattaatttttcagattagaaattaattataaacttttatccaatttcacacttctccaattaccagctgtaaggagtcatgtttttttttcttctttaagccctaatatcctcttttatgaaataagcaaaataattccttcaagttaatatgcatagtaagtgagatatacacacacatatacacacacgaacacatataaaatcatcatacagtggctgacacatagtagacactaagcactcaatcaatggctggtatatacatgtctacacggatgtcattacaatattgagtctcataatctagaaacatagcatatcatttcattagtagaagtaaacctcatatcctatagtaaaaaataatgtttttttaaaatcagtgccacctttttttttttttttgccgtaaatcttttaaagctttttctaaaaatatttgattggcagttttgaataggataattttaattttattttctaactacttaaaactaatagtttatgtttagtaggcacttccatgggaagtacattgctgaatgctttatgtttgcgatttcaattgttttcacaattgtttgacatgggaaatattattaacttcaatttacagatgaagaagtagacaccaaaaggctgagaatatttcttcagctggtgaatgactaatcccaaattcaattcagggttaaccttgatttttaggaaaacaattgatgtgtctatattgttgttatagccagccatcgactacttatgcttgttacttctagttatgtctccttgattctcctgcttttttttttttaaaaggtaatcatgttaactctaactaccgagaatcttgcttcctcttttctaatatttatttttctaatacatttctgaacaaatatagttttggtgaattaaaagcaataatttttaagttcatgttaaaatttgttaacagaaataaaagtcaagtacccttgggacagagtgtcctccacatttccaaatctaaaatattttgttaagtttgtttgccaaaccctgaacacctagaggctctccatctttttttaaaaataggatactactgccaccatataattgtcctaacctcatcttgtagacattctctgacgctcggttttaaaaggcaaactctaagacacccaggagcatgtggcagggaaaggtgtttggggttcaggttaaccacctttcccacccaggacaccacatttggctcaaagcttccctccagatgcctgacacaaaccaaaaaacaggagtctggagtccaagttctgagtgagcagtttaattttcaaagggcacatagctaagaggcgacttaaattttccaataagttcttcagcttctcttttcatcacattcacagattggggcattgaaattgaggccttccatggtggtaactttttgaaacaaaacttgcttattttccagacccaaggcattgagctaataggtctatcttcgtccccgcggaacctgccgcgagccagggagagcaaagaacagctaccaaatgtagatcaagagaagacctgcccttgcatgcacccacacaaaagagagaaacaacaccagcatgagaagattccaaccagtcatcaaggtcattctatggttggtttgttgaatgattttcccaggtgactcaattcatgttgattaatggtggtgccagaatctttgttacacatatttccaagatgttctagggtgttatctcaaagccctttctcaaacttgtgtgataaatgtttctacaacattgagaaagttaaatgaacttacgcagaaattttgaaatattaatagaaaaagagttggtttttttttttgcattaaactttgacgagagacatgagacaagaatagtatcataagaacctctccccataaaaaaatgattgtgaggtgtgtatatatatatatgtatgtatatcagatccttaaacatatgtatgtgcacagactaatgatccttaaatcattagtgagtatacatacatatgtttacgtgtggaatgtgtatgtgtatatatatataattctagcacagaaaacaataccataaaaccataatgccataataggccatcatttgttagtcttgaaataaacaatgaatatcaactctgccctacatgactacaatccctctatgataggaaaatctatgatttacaaacaactgtgggtaacaatggagcagtttctgtatatacaaccaaaggccaatggtggaactaaccacttaactctttttctgagaattccaagactaggaactatagttgtgtaagcataaataaattatctgtccactaaattaagtaaaatactaattctttctccaacgtagtggtctgagctctatctaaaaggataatataataagagatcagaaaagatatccagaataaaataaataaaaaataaaataaataaataaaaaaccaggaaggccgcagggggaaaataccaggtatatagaacaggaagctatgtgaccagtttaagagatgtgtacgtatgggaaagagatgaaattcaagcagcaatgtgatttttataaggaaaatgatttttaaaataagcaaaatatagaagtagctgatcttggcttaagggatgacagaaggccaaaattaaatagcatttcattagccttttaaatggagtgactccataaatgagtgttttaaaaacatagacatcaaattaacccaactactgaaactgacagttgaagaaccattaatcttggaagggatatttccctttaggcttctggaacagatccttaaatcgttagtgtgtgcacatacatatgtttatgcgtgcgatgtatattcagacacatgcttagacacccacctggaatattaaattgacctgctttcaacaattggctaatgattagaactccccgaaggcaagcggaggaaagagaatttgttgctaagaacagggacagagagaagtggacaagagatgctagtatccccaccaagtcctcccagcccccttgcatctgcggtttctctctccctgggccctccctgcagagctgcagttacctgcggaaatacccaggctccgctctgagcaccaggctgtctcccggagtccctatgtagccaagtggagccggagggttgatcccctagcccctacacacagccttcctttcaccaccttccgtttatacaaagactggcttatcccaattttttttcctgttgccttttcaatgaaaagctctccacgcgcggcctaataaaattctacgcctgccccacccccatcccaaaaatccctgccaaaaaaaagagagaggggagactaaaacctggaactcatttagctaaagggactttagttaacaagaaagttacccatcatgaactgcaggtaacacctcccgtgatcctaaatccattacctggagacttagcccaggctgagtttgattttatgaactgtgaggttgcaatgttgaaagtctgcaaattggacataaattggacgcaaaagactgggggagtcgagtgattttctttctaatggtataacaagctttggctcttaccagagattcctgtaatctggagcagagacaaggatgggtgcctgtatcagtcacgctctcaatccaagatttcccctcctccaaaaaggtttgactctgactcgagcagctctatctagggcaaaatcatatgttaccatgtgaattactcataatcgcactgaagtgtttgaccaagcaaggaatgtcgtaacgtgcgtgcatgcatacacacacacacacatacacacacacacacacacacaccagtgtataccagtctaattcaggaatagaaaatgggttctctcctgcttgttgtctcttaccatcaacaatatcctgtgatgtttttgactgaaacacttttcagctggcttccttggcattcttgtacaactttattttagagaggatggcggatgtcataactaattcaatcatcagcttctgagttttaaggaacacaaaggctaccttcagattggggttacagccccctttcaatttaattaagtatttgtttaatgcttattttgtaaaaggatctaaggatgatccagagattagaatctgggaaggctcacaggtgtcataaccgaagtataaggccaggcataacaaatttctaataaagataaaatatgaaaatacagaggaaagaaagataaaatccaaccggggactgggaaaaaaatgtgaaaatctgggcttcaaatatttaattgtgattcaacaaatggatagtggtgttggtttggggtggggagtagaaataggtatcccaaacagaaggaaggattttagaaaaaaacacagccttgcagcatagcaagaccttgtctctattaaaaaaattagccgcccaggtgcggtggctcacgcctgtaatcccaacactttgggaggctgaggtggatggaacacgaggtcaggagttcaagaccagcctagcctagatggtgaaaccccatctctactaaaaattcaaaaattagccaggcatggtggcgggcacctgtaatcccagctactcgggaggctgaggcagagaattgcttgaaccagggaggcagaggttgcagtgagccgagattgtgccattgcactccagcctgggtgacagagcaagactccatctcaaaaaaagaaaaaaaaaaaattaaccaggcacagtgatgcaagtctgtagtcccagctacttggaaggctgaggcagggggatttcttgagcctggaagttcaaggctacagtgggttatgcttgtgccactgtactccagcctgggtgacagagcaagactctgtctcaaaataaaataaaatacaaatagaaaaaaacagcagaagaaaagttcatggaatggccatttgagtggcattggcctggtctactattcataagcgaagagagaaacaatggataaaaacttgcaggtggcattacgagcaaatccaaatgccaggctgaaagtttggcctctacacatacgcaacagtagaagtttggggaacattttgaacatggtaagtgcaccatagatctgcatgagtaagtttgctcaaatcaacagtaatagcacacatttaagtgtctcgaattctaatgatggtatactgtataacgatttaagtggaagaaataggttaaatatgttttttaaagtgaatacaaaaacagttataaaagtgtgtgtagtaaactattatcaaattttttaaacaaaatagttaaatattctttatggattcacatgtatcaactccccgatggtaattacctacagggaagtagaagggaaaagagatatagctctagtgttttatttacttaaaaataaacattaaaaagtaaaattggaacgcaaagcaaatatgccaaaatttaacatctcttttatgtgggtattgggtatgctcttccataagattaaatattttataattttttttaaatgcaaatttttctatctccttttctttacactcagtgagatggtttggatctgtgaccccacctaaatctcttgtcaaactgtaatccccagtgttggaggtggggcctggtgggaggtgattggctagtggcggcagtttctaatggtttatcaccatccccttagtgctgttctcatggcagaggtctcacaagatctggtttttaaaagtgcgtagcacttcccctctctcttcctcctgctctgggcaagtgaagacgggcctgcttccccttgaccttccgacatgactgtaagtttcctgaggtctccccagccatgcttcctgtatagcctgcagaactgtaagccaagtaaacctattttctttataaattacccttatgtatttatttatagcagtgtgagaatggactaatacactcacccaatacttgagctccatctgaagcttcctcatgtattttctcagagtcttggggagtttatcacatgtgctcactaataactgtggtcattcaccaggaagtgcttctcgtgtattgctacctccacaggaaatgccccagggatgctttgctgagactatctcggtatcttggtgggtgtcaggcaggtagtacagtttccttctagaaactgtgcctcactcccatccaagtactaaccaggcctggccctgctgagctagcaagatcagatgagatcaggtgcattactcccatgtttattgcagcacaattcacaatagctaaaatgtggaagcaaccaaagtgtccattgacagatgaatggataaagaaaatgtggtacatatacacaatggagtactattcaaccataaaaagaatgagatcctgtcatttgcaacaacatggatggaaccggaggatattctgttaagtgaaatcagccaggcaaagaaagccaaccttcacatgttctcattggtgggagctaaaaattaaaaccactgaactcatggagacagagaatagaatgacgtttaccagaggctgggaagggttgtgaggtcgggggaatggggacagttaatgggtacaaaaatagagttagatagaatgaagatctagtatctgatagcacaacacggtgattacagtcaataataatttattgtagatttaaaaataactaagcaagtataattggaatgtttgtaacacaaagaagtgataaatacctaaggtgatagatagcccatttaccctgatgtgattattatgcattgtattcctgtatcaaattacctcatgtgccccgtaaatatatacacctactattagccataacaattttttttttttaaatagcaactgtgcctcactgaatgtcagtgcatctctacggggcagtatgtgtctccttcttatctctgacagcacttctgtccagaaaaattcctgcagagtattctttattccctacagatgtttccacccatacactgaaatatattttgggtccaaagtctgctgtaagtggcagagaaatgagggctagcaaccctaatccttttgtattatccacagtttgtaggataccaaagtgatggttatcttgcccttcaagtatacaggctttttataggaaaatatttcttctagcttttaagtccatagctctcttctggatgaaggcattaagtccagtagaacaactgtaggctctgggctgaactcagaatcatctctctgacaactcaggttttactatttgatcaagctttacttttcaattctgtttccctcaatatgagtttctcctaagaggcttcctaagcccacttagagataaattttttgtcccaactttccaccagtttaaatgacatgctcggacatagttaagactcaagttggattctcgaggacaccgggaggtttgttctggcagaagcatgtggaacaacctgggaacgggaagaggctgaagtcagggagaacagagaagaagaaagctactgcaggcactcaggcaaactgtgattgttacgtgtaatcatgttacagcagtcttcttttgctgatgtattggggatgctctatggaatatgtattttatatatgcattgcaatggcattctctctagtacttcaagtctgaaaaccaatatatggaaaaactgagtctccatataggctacctctaggatacactatagtgagtaaagatagttaaaacccttagaaacagactcttcctgtctgtgtccatgatcctaaaacaaaaactcttgggaagataagaatgaatgaggaagtgtatgggggtgggaagagttagataattaattttgcaaacactctattagtattacctttaaatatgctattacatatttaacatatatgcccactacccacaactactgcctataaaaccagctgagcaaaagccatcaaagaaaaacagccatgaaacatgtttagatcaggccgctttctctcatcgtgtagtaaaatattgagtttgaggccgagtgtggtggctcatgcctgtaatcccatcacaggagtttgagaccagcctagccaacatagtgaaaccccttttctactaaaaataccaaaattacccaggagtggtggcacacacatataatccctgctattcaggaggctgaggcagaagaatcccttgaacccaggagacagaggttgcagtgaggcgagaccatgctattgcactccagcatgggcaacagagtgggactttgtctcaagaaaaaaaaaattaggttttgcattgtaaaagcaaaatgccttcagatcttatgaatggagtcttgttgatcttaaatagttactggcatggttcaaaggagaatgaagacaaggaaaggaattaagtgaaacttcaatattaccttgaagtagataaatagcttcattcgacttgtccccattgttacaaaaactaatggtttaaggtgaaggctatttttttttcaatttcatttaaagatgagttaggtatccacagttttggatgtgcgcagatttttgcctgaaaattttggaagccagagtataacaggagaaaaaataaatcaccaccaaatagaatacagcattgcataaatctgaaagttctccacattttgtgaagtgaggggtaaaaacccttgctgaacagagcaacaagaaaaactaacccagagtatgaattttcatatagagtaggaaagataaggatggacaagacaggaacgtgtggttaattccagttttaggcatatttatgtggctagcataggccaaacaacactatggcttaattcagctaattgctgtagagcagaatatgagaaaatatcttttctaacgtttttaatttgtcattgctaccactacaaaagcaacaaactatttcataatggtgatttcacatcgtatacaatatcattttggggatggactcagtttctaagaagccctgttttctttatcatccttagaaaaaaacggaagaatttcatccacgtggaacaagaataatctttactcctttctctttgactttaacaaagtcaagtctatcagtgaaggtgaattactgctaacatcttcagtgtaacgaaagatacgtgaattttggcaacaatattattcatttgaatttttctgtgtcccaaatgtacttaggagcaacagcagaaccaagatcccaagattctacagtttatttataaatttaatataagtctttcctgctcccttcttctttttttttttctccttcacaaaataaaattgtgttccattcttatatagggccattttaaggaattaactattgtggggagtcagcatcataaataatttgagttctttcataagaactggaaaattgtctaagcaattgccagttaaaataatggtagatgcgaaattaagtcttccgctgcagtgtgtaaactgagtagcagttgtggcatgggaaggcatttccctctgcttatttatttaccgtattttctggaccctcctatggtaggaaaagcctgaagacacagtcacgaatggccaaatgtagtggcatggaaggcaccttcttatctatttatttatttatttttctttctgcatcttacgaagacatgcaaatatgggaaacactaccagtcggcagtatttttgtagcacgagctgcattatgggctgttgatgtgtacatatgtggatttttcatcatcctaaaaacactagggaccaagttccatgaacataatgtgtatatgattgggatgccattgggcttttattgtcctagtacaagctgtattttctggctgaatcaagacaagaacacttattaataaaaaaggaaaacatcaacatatggaaaaaaaatcgtaagctatttttctgactccatctgttttccacccacacaatttgctcactacagttaataggaagctgtggtgtacttcttgtgcttcatagctctagaatagagaacatgagattacgatattcgcgttgaggtagtacagtaatgacaaggcactgtgtgacctcatgtaagtgggatccaataccactcaggtgaacaaaagctttctctaactttacacagtttcacgaataggattttttatactctttggactcttctaatgcaggaaaggcttacagctgtggcaacggccagccatgtctttggccttagctggacaagcggtccagtggataatctgaactacatcagggtgcatgttgagtttgaaagggagggctgcctgggagcggtggctcacgtctgtaatcccagaactttgggaggccgaggcggagggatcacctgaggtcgggagttggagaccagcctgaccaacacggagaaaccccatctctactaaaaatacaaaattagccgggcgtggtggcgcatgcctgtaatcccagctactcgggaggcagacgcaggagaattgtttgaatctgggaggctgagattgcggtgagccaagatcgcgccattgcactccagcctgggcgacaagagcaaaattgtgtctcaaaaaagaaagaaaaaggaaaaaaagaaaaaaaaaaaaaaaaaaagaagaaagggagggccatacgaaggaatgcccctaaaagcacgggggaaaaaaagaaaagaggacaatcacagaagctgccagggcactaaaggaggaaagttctagtttagtgttcagatggcccccaagctttggaacattgccaactatccgtgctgacgtaagtgcagactcccacatctaagatatgccattgtaattcctatttttgcttttctgctgctcaacctgattctcctttctacaaggaaagtcactaaatgctataatcagacccaatagagcatttatcaatgtttttctcattaaaaagtaattatatgatttaaatataatttgggagaagattacctaaaatagcatttcaaaaatcagtgctaaaagcagttggaaatattcacatgcatatgagtctcatgatcacattcacatactacctagttcttaaaaatggatcatactctatcatctgtttcaaatgtctttcagggctgcctgttacaatagccggaggaacatgccacagagtccccgtcatggctaggaccttacaggaaagctttggctgcatggtcacccaccaattggaccagctatttgaccatgaattggaccccctcaaggtgctgaaggtaagaaagaataagaataaagaagctgtttgaggggcggtgttggaggccctggggccaagactgcagctcaggccatagctgagaccaactccaaggcatcagggacacagctgcctaaaaagtcacagaaaggcctttccgtggtggtgcaagcctataatcccggtgctttaagaggtcaatgtgggaggattgcttgagtctaggagttcaagactagcctgggcagcaaagcgagatcccgtctctacaaaaatttaaaaagtaccctaaaacttaaagtataaaaataaataaataaataaagttatccaagcatggtggtgcatgcttgtggtccaagctacttgggaggctgaagtggaaggatccttgagtccaggaggttgaggctgcagtgagctattaccatgccactgcactccagcctgggtgacagagcaagaccctgtctcaaaaagataaaaagagccccaaaagacaacaagaacccactgccccctaacatttgcatgattgacaagaattatcatgattgacaagaaagaagagacacagctgctctgtcacttaagagagagggagtaagatgcctgagaagaaggcctgatcaacaacttcagagggatggaaaaatgattgagagaagaccagaaaggtgaccacctcatgagcgaagatttgaaaagccacttgaagaaaaggaagaaggagaagcttcagttgataggttgattagtgacctctcattgatagactgattactggccttcctggtggaggccatgggggtcttggaagaggtcgagggggcggtgggcgtggagtggccaggaagatgggtttgattctcctggcactcatgagtatgatataagagcagtgcaagccacacagctggcctgaagcaccaggacagacatgtgggcggcagatgtcacaactggggaactgtcaaaggtggattaacagagtccccaaaatttacattcagaaacaattatcttatcattgcagtgacttgcatcaatcaaatataactaaggaaacccttgaaggtgaagaacatgcggtggcaggcattgaaaaggaggagaatgaagctgaggaggtaaaggcagaggctccaaaagggatgactttgagtgagtggaaggctgtccaacataaggactgggcggaggtagaatttcatgtccgaaaaccacgtgaaggtggaagaagttggttcttcataaaccaaagagtgaaaaggctcatgctgaagatttgattgtagaccatcatttccagaagccagcaaatgatatagtgttctgatataatgtctcagctggagattaattctggagaccttggccacccaggacagtggtggcagggtaggatgccatggacctgggcatggtggatgtcagaaccatggcagcaggatccacaaggcagttgcttctgctcttgacatgatgacccaaaggtacccccagctctggcttacctggatgcccttagacaaccctggttcctttgcagactctcctctttaaagctgttgcatgtttagtgcttacaaatgactaagaaatgttttaaaaagaagattgctattcattccattcacacctaaagactcaattttatctgttttagaaatgaacttctctcgctacacagaagtaacaaatatggtagtcagttttgtatttagaaatgtgttggtagcagaaatgttttcataattttcagagattatgcatttttcatgaatgcttctgcattgctgctttaaaatacgcatttccaaatttaaaatatggatttccaaatttaaaatatcgctgtgaatggttgaaaaaaataagggggctggatgctgtggctcatggttgtaatcccagcactctgggagaccaaggtgggcagatcacctgaggtcgggagtttgagaccagcagagccaacatggcgaaaccccttctctaccaaaaaatacaaaaataagctgggtgtggtggtgcatgcctgtaatcccaactacttggaggctgaggcatgagaattgcttgaacccgggaggttgcagtcagccgagattgcgccactgcactccagccggggtgacagagcgagactctgtctcaaaaaaaaaaaaaataaaaaataaaaaataaaaataataaaaaagcctttcaagttaattctatattctgagcattttgtcatacataaaaatatttttctctataacatggattttagtatgagtgttatgtagttaactagctatagttctgatatttcaaatttttgtttagcatgatttgtagcttttctgcacaggcctgtatatattattcctgttctttctttctttcttctttctatttttgtttgagatggagtcttaactctttctccaggctggagtgcggtggcacgatctcggctcactgcaacctccaactccgttgttcaaatgattctcctgcctcagcctctcgagtagctgggattacagacacgcgccaccacgtccagctaatttttgtatttttagtatagacagggtttcaacatgttggccaggatggcctcgagctcctgaccttgtgatctgcctgcctcggcctcccaaagtgctgggattacaggtgtgagccactgcgcccggcctgttgctgttatttccaaaaatatataacctagattgtgaattgcaggaccaagtgactatttgtaagacttctgatgaatactacacaattgtcctctagaaagagtctgtccattttatccccacaagcagctcctcttgtttttaatatgctggtgttatttttaagcaacgtggataatttaggctataaaaccccataaagcatcaaaatgtggaaagaaatatctatcctcctccaattttattgacgagggcttagaagatctctaggaatagcattcttacatacagttacttaaggaatggagagggcactcacactcactgggtctacaattttcaattttgaaagtggggaaataatcttaactgtatttgttctctttacagcaggatgctcatgggctcccaggcgacagcgtgaagagacacaacaaacgaaatctcattgtaggagaaacattaacaaaggtgaggaatgtcctttggaaaataaaatttttgaaggatcctagacacaacacagggtacaaccagtgagtatctccatgtcctacagtgggattaacatttgaaattcttggactggaggagaacttgttttctgctatgggaaataaagaactctcctctgttgataaactgccatttacttaatgtacattgtgacctgccagtttaccgcatttaaattaaattgcaagatttatgagatagaacattaaaattataaaaatagtgatgaaaaggatggcaaaactgcacttatgtatgcaccaacctaatgaaactatcaaaattgtaattctgtttaccaaaggtaaccagaactaaagcttcatacccaaaacaatttcaaactaatatagtgggatgaagaagacttctaagcatccttagccaagtaatgaagagaatcgatgtaaacatgatacaatatgaaggaaagtgtctagcctttggaagatgacggacctggatttaaatctcagctatgtgaaactgcatgcattccataacttctcggagcttcagttttctaacatattaaatgtgtataaatgttctcttgtcttttttcctttaatttataaggatttgggggataaagtatgcaatgggctgaatgtaggataaaatattcaataaatcataattactgtcattagaattaagtgtaaaattgcagagaaatataaatatatttcctgagttttttcaccactctcctgtccgttggcaaatctcaagttttaagagtatgcctggagtcatcatatagcccaataaatatttaattcatttagttttattcaaatccccaataattatgagaggtgtattgcattgggctaggtcctagggttacagagataaacaattcacaattttactctatggggcagtcttttctaggagaaccaaaaattagagtatatataataactgtccaaagactgagaaaagtctccacttattcatacaactctcaagctaataatcaattacttctccatagtctccctgctttctagacgaaatataactaatcatttatctctccttacatggaaactccaagatctgtttccttatttttctagacattctctagcctttgccaacagtgccatgactttcattttgaagactggtatgtacaaagtgtatgacccacttttgaattaagaattataaaggaattcttaatgacctgggagcagattattggaattaaagattatccatggacattttgcttttaaattcatagtaatattttcattggttctgctaattatgcagtttgtggaaacaaacgggatatttacttaaggttagactagggagtagaaaaattttcaaaggccaaaataagtatctctggccctagggaaagtgtaaaacagcaacatttgcaaaagactgcttttctcttcaggttggtggtttggaataatcaatctcagaagtgatatataaataatttcttttacagaaataagagaagagctaagcataaaggcaaaatgagaaaggtgacttttcctcattaaacttcattacatggctgggcgcaatggctcacgcctataatcccagcactttgggaggttgaggtgggcggatcatgaggtcaggagatcgagaccatcctggctaacatggtgaaaccctgtctttactaaaaatacaaaaaattggctgggcgtggtggcacgcgcctgtagtcccagctactcaggaggctgaggcaggcgaattgcttcaacctaggaggtggaggttgcagtaagccgagatggtgccactgccctccagcctgggcgacagagactctgtctcaaaaaaaaaaaaaaaaaaaaagaagaaataataaataaataaacaaacttcattacatgaatcattagattattttaagaactgaaaaaaaaaatccacatatcacatcactaccatcatattcaaataaaaactccaaaaatcaaatggaaccatttgaaaagtgttctctctttagagttaactgtggtgtccctcccctgtacctctaccctttttttccccctacccattagtgtgaataactgatagttgactgtgtaaaatatcaggtgaggtttggtgtccttaggacatagagtatacaaagtgccatggttagtcataaagaagacaagacactccttccttcccttctatgagtgaaaacactgcataatagagacaactttgacattttaattttcttttcttttctttttttttttttttttttttgagatggaacctccctctatcatccaggctggagtgcagtggcgcaatcgtggcttccaaatcctgccttcttgggccttttatggagactttattggataggcatgattgaccactgtgtggaaatgtgattggacagaaagagcacggtcttacactaatggactgagtggggaaacccagcaagtcctgtctgttccgattcttcttggtctctgtgcattgttccttcctctagggtatggggcaggaccccttctgaaatgggggtcttatggcccacaatcagacaaggtgggtcagataatttctttatggccagctccaagatggaaaggtaagggaagattcctgccatggggagaaaaagaaacaggtgaaaagagagtgggagatggtcagggagagagattctgttttctaaggcttaaaattccccaacattatagaaagcgctgtaagagctatgaggcatgaatcattaacaaatatccagattctctatgtctatgtctatattataatatcaaaacatctgtacattttcctttaaataaaggaacatatctatatgcttaatatatgctttttaccatttatctgcataattccttctaccataaataatgttttcctaattcatatccctgccgaaaattaaaagaaaaacaatggagtcagtgttgttaaataatttatttaaatgacatcataatccagcgctaagataaatgctctaaaatcctgaaatgtgggtgaatctgttgcttggtttgcagaaatatcttgtttccaaattctgtagacgctggctgaacaggaggagagacagacagagagggaaatagagagcaagacagagaaacataaggagagacacacaaagacagacagaatagagatcaggatgcagcatcattagaaaaatacttctaaaatactgggagaaatccctttgctacggatgctatcgcaaacatcttttgggtaatataaaaaacattaatacatcggccgggcgcagtggctcacgcctgtaatcccagcactttgggaggccgaggtgggtggatcacgaggtcaggaggtcgagaccatcctggctaacatggtgaaaccccgtctccactaaaaatacaaaaaaaaaattagccgggcgtggtggcgggcgcctgtagtcccagctacttgggaggctgaggcaggagaatggcatgaacctgggaggcggagcttgcagtgagccgagatcatgccagtgcactccagcctgggcgacagagcaagactccgtctcaaaaacaaaaacaaaaacaaaaacaaaaaaaaagcacattaatacatcctcataattgactggaaaacgcactctgggactgcagtttcagggttttttttttttttcgttgtttttcctgaagcagtacctatgtggtttcactgaagagaagcatgaccttgttctttagcagaccatgttggaaattcagggaaaaggtgccaaggatttcttagaaatgtatttcatggtacagtatcaaggggcagtatttattttggatatgcttccactgaagaattgagatgctgtgggggaattttgttgtttccgcatataatgttaatggtcctaaattaattacaactctaaagttaaaaggttcgaatgccttaatggttctttttttgttttcaaaattctagagggatttggctctgaacaaatcctgctcctcacctatcaaaggatccagtgtgttttaattctgttactcacccaaacgtgtatttctttttctttctctgctcgatctctcctaaagaaatactgccaatcgaaaacaaattgggttcaaaaatctatgaaataaattagtctgcaaatgatgctttaggaattaagccagtgttttacgggaaaggaaagatgtttacctactgtgatccctctcataaaaaaaaaaattaaaatgttggccaggtgcggtggctcacgcctgtaatcccagtactttgggaggctgaggcgagcagatcacccaaggtcaggagttcaacaccagcctggccaacatggtaaaacccccatctctactaaaaatacaaaaaaaattagccaagcatagtggcacgtacctgtaatcccagccctgacctcagaccctccacactttggaatgatttagaagtgtcatctatgacaccccagatagggaactgcttgagccccagctcttaatttcccttctttgaagcactttttggtcctttctccaagtgtggggtggaacagatagccctgtggaataatctgggccctaggtgtagggagcgctgaattcaggaggacctagcaggtggatattttgcatctcaattactgtcttgctttcacctctttgtttactatcattcttgacaattctgatatccatctaaatgaaccaccaacagcccaccaattccttcacttctttagattctacaatgtttcttctctcatttcactaaaaaagccattgactcacatggtcacactcaagacttttaatcaccagtaactacaccaatttgaaaatcttaatttcaaaccctgctgctttgaccatccatctactactagtcatttcacttactctgcttctctcactccagaaattgactgattcacccatacctccaagccatcaaaagcattatgttttctgtatgcataaaatccctttgcatctgagtcttcatttccctttttaaacaaccatcctccatggtctagtactataaccagtcccttgcatatactctgaattcctatgctcctctgtgcttcagtgaaatgttggcaatatctatccctaattaacccaatcaatcatttactcaatgcctagatctgaaaatctgaatactctttgaagtaacacacgtaacaacttcatgaccacaaatcccagagaagcctctcacatttccagacaattttagcattttaatctaattattttcccttctcaaaggtgacatttctccactgtctctttcctgaaatttttctcattctcagctgaaaatttgattcatatttaataaaatagatccaatccagtgccttatcttattacagctacatccaccaaaatacctgcatctgtatcacatgttgtgtcatctctctctttaaaatctatgaactttctctgctcttatctaagagcatggatactctggatccatactttcataccttgttaggacctcactcctagaactccctccttttacttctgtctcaccttctaatggttcatttacattagtactcatgtagcaggacaagttgcagacaaaacccctcagacaccgagttaaggaaggaagggcttcatttagccgggagcttcagcaagactcacatctccaacaaccaagctccccaagtaagcaattcctgtcccttttaagggctcacaactctaagtgggtctgtgtgagagggtcgtgatcgattgagcaagcagggggtacgtgaccgggggctgcatgcaccggtaattagaacagaacgggacatggatttttacagtgcttttctatacaatgtctgtaatctatagataacataaccgattaggtcaggggtcgatctttaactaccaggcccagggtgtggcggcaggctatctgcttgtggatttcatttctgccttttagtttttacttcttctttctttggaggcagaaattgagcataagacaatatgaggggtggtctcctcccttactcaaatatgccttaatatcacccacctttaaaagaaatttcataaactccaacatctaccttcagttactattccatttctccatttcatttgctagaaacggccatccaaagagttgtctatagtctgattcctacttcctcagcttctgtcctgtgctcagatttgccaaatggactttcattaccatcacactataaacatttctcataataatgttacagacaaaattcatcctttggaagatgatgttcattctccatgttcattctaaattaccttttaacgtcagtggcccagcagcagatgaccagtccctccttcctgaaactctttgttctctaggtttttttcaaccccaacgctcaccttgcttgattttctacctcttcttatcaccctttcttcctctcttttatttgccccttctcccttaccaaatctcaacatattagaatgtcccagagctccctcctcatgccttcctctcttttacagctttacctaaatctcaggataaagaatctcaaattttgatctccagacctgtcccctgagctccagagtcctctatccaactacgtacttgagaattctgctaggatactgaatttccatctcaacagaatgccatcaaaaagcaacatattcattttcactcagaaggttcttccaaagttttttagacattttagtaaacaacattaccaccactttgtcatgtagaagtagaatctaaagacatttccctggttctgttcccttcatcatgcaaaacatctactccatgaatgagtcacatcgcctctgcctccaaaatattttgtaaatccaaacactttctatcatcatactgctaaaattgctgaacaaggtcagtcatctgttacctggattattgtgacttatccagttacgctagttaagctttctaactcgtctctctacctttggtcttgctaccgctgccttcaatgctacccatctcaatattctcttcacatagcaacaagaatatttttttttctttccaaattgggagtgttctcacatccttaccctgcttaaaatcttctaattggctgggcatagtggctcacgcctgtaattccaacactttgtgaggccgaggcgggtggatcacgaggtcaagggatcaagatcatcctgaccaacatggtgaaaacccatctctactaaaaatacaaaaattagctggacgtggtggcacatgcctgtagtctcagctactcaggaggctgaggcaggagaattgcttgaacctgggaggtggaggttgcagagagcctagatagtgccattgcactccagcctgggtgacagagtgagactccatctcaaaaaaaacaaaaaaacaaacaaacaaaaaaacacaaaaaaaatccttctaattgtttacaatcagattatccagactcctcagtatggcttacaagacactggatgaactgaaacttgtctacccatctgtcctctactatctcaattcttcccacgtttgttatgcatatgctacagtgtctcccttctgatttaaatttggcatatccattattgtctctggactttgcatttgccatttctctgcctggggcacttcgttatctgaaatttccttggctgcctgcttcttatcattgaggtctcaaatcatagctaacctttttagggatacctttcctgaccactttagttaaagcggacacctgatctctatctcatcaccctatttttatttctttatcaccctttttttatttcttatcaatagttggaattcatatcttactcattttttgttcatttttagtatctcctcttaaacccaactgaaaagcaagctactggaatgcttcattcacggttgtatcctaaaacctagtaaggaaattgccattttggtaaaaacttaccaaagctgtttagtggactagctatatccacctccgctgagatctaaactgctcagcatgcctcacagattatagcaaactttaatgcactctcatcggctgactacaggcaagtaatcagtaacaacgcaactcactgcttctaacagttttccatagattaatataggatgtctctacctcacagggcagactgtgccaggaagtcatacactgggtccagtctggttgagtcaaactaaggtacctggggttttggttttgttttgttttgtttttcatttattgtggagcaccgatgacagtgcatattaatagaggacctcagtgcctctggggtcttggaaagcaacctggtcatatgaaagagtcctctgtccctcctttcctgagtgtcaatctttaatttagaagaaaagaaaagtacagcttttttatttggctgtattaaaatttatggggcagggtggttttcaggctgctgctcctgccaggcattgctctgatgatgtatgactgtgacatgtcaccagtgtagccagcctctgatgatccattgcagcagcaagtcatttgtcatacatcactgcctcgacagctgcccccatctgggcctctcctatgtactccagcagggagtcctggcttaaaacaagctccgtgctccttctgcactcccacggccactgcgtttagcatgtatttcttaccattagtgagagaaaagaaaaataatggttagtggcaaactgctggagttttaaaggtaaaaggtttacatattctgctgtcataagccaagagcaaataatgatgattaggaagatgacttgatactttcagaatgccacattaatataaaagcactcaaaaatagtgatgtagcattcattctctgccagctattcttctaaggattttacatatattaagtaatttaatcctctaagagtccttaagagatggtattattatcgcccattttacagattaagaaaatggggtacagaaagatcaacctgcccactgtcatccagctcagtaaacagaagaaacagcatttagaccaagtcagctgaaatctgaaacctttgctctcaaccactatgccttgccgtatatactttcagacacggttctagtggttcttcccagatgcttatgttgacccctgcattccaggaccaaataaacacacagacactatgcaggcattttattcaatttgtaaaatgtacttgttattaataataattattattaaagataatatcatttaacaattgcatgatagattctagggcatatgataggtagtttgctaatgttattaagtttcccaactttgcaaggtattgttctattttcttttgttttgaatagatggatagaggagtacattaaaaagttactgaagatgttttcaaaacaagccatttgcaaaaggactaaagagagaagaccaaacaatcagggacagctataaattgaaaaagtgaatgagtgactgaaattgatttctgtagaatagttgaaatgccatttgtatatattttaaataaataactcagttaaaatcgatttaaatgtcattaaaacagagtttatagtatttacttttctattccaactgaaaattagtatttaatggctgggttgggaaggactcttcacagattcatatcctttacagttcctcgcattcaattacaacaggtacatctttctgtaccaaaaagaaaaaaaaaaggaagcaaagaattattattattaggggttttaatgcatgaagcataaataaacggattcaaacactgtaaaggagataaccttggattttgagtgtctattatcaatgtcctttattttaattgtaatgaattggggctatgggagtaaagacatttttcctacctgttgataatttcattactttcaacaattgtagtagattcaatttcaactgaggtaagaatgtgctatgagcaaatacttgtttatttcacttattggaaaacaaaatttgttaattatattttctttatatattaacatgtatcatatattaacattttcataaattattacacatttttaatcaaatctttacataaagcacacacatatgcaagcttaggaaaagaatgaatgaataaatgaaccactgaatggattcatttgaggaatattagcatttattaatttcctttctaagctcttaaattagaaaaacttgacaagaaatatttaaatattgaaataagagttttaagagtttaaaaaaactcttaatttccagttactaaatatttctcttaaaattattgtgctaagaaaccttgctcattatggaaaacaatacccgtagaataaggtggccctggagcactttgcggcatggaaaaaggaagggaagaaaggcctaagactcttataattattcagtgagttcaactacttaaaatttgcctggacttctcagctgtggtttccacagcattttaataaacattgcaacacaggactggatttctttttaattgagcatttctgaacagtcatcttcctcttccatccatcagctctgtttatgtgttgcctcattatcttcaattgcagagtggtgttctgaattcagctggagaaatagctaccggctgccccaggttctcatagaaggcaagagacagccttctcaccagctctagcaataagaagggatcagtgaattacaagtttgctttccccacaccaaggttattagtctgctcttctttaattctcacgttcatttgaacttcactcttgtgtctctactttctcatggccacttccgcttaaatgttctaccattgcttgaaactccacatacttcaaattgaattgatcctatcctgttctccaaaaagcctacttgattttcagttttctaaatatcttcgatttaaatgtcattttctttgattcccaaaccttcttttttttttttttttttttttactcttcatgttcagcagtcactggatcccatcatttatttactgttcttgagaaagtctcttagatcaactttcctttctgcttcccagaggcaaaaccgtgtactctaaaaaactcatagaatttggttacacacagatacgggttcatgtccctgaatttccaggtactagttctgcaaatttggaggagttgttcaagctctcttgattttattgtccttttttataaatgaagaaaaacacatgacatcttatttagtttttatgatgggtgttataaagtttaaataaaattattataagtttagaataaattatttgacagtttctactacagtagctgtcagagttggtgctgtgtaaataactgttaggttgttattgcagttaccagcctaaacccagcaaaccaatttaaagtggcataacccaatttagactagttaaaaaataaaaattaaaaacggcttttaaaaaaagtattgatatggaatgacttcaggctcagctgggtctcaacacccaaactatttcatcaaggttttttttctctctttattcttttcacctgtgggataatctcagggattaacctcattccctcccactacagttaagtttcttttttcgttttttgagatggggttccactcttgttgccaaggctagggtgcaatggtgcaatctcagctcactgcaacctccacctcccgagttcaagcgattttcctgccgcagcctcctgagtagctgggattacaggcacctgccaccatgcccctaattttttttattttttatgtttttatttttagtagagatggggttttaccatgttggccaggctggtctcgaactcctgacctcgggtgattcacccacctcggcctcccacagtgttgcgattacaggcgtgagccaccaggcccggccaactttcttcatcatggctggccaacagcttgtcttcccattctttcagcactattacaagtaagagattgttgtctccaatgtcagaatattgccaggggagaatagcatggggcatgtgtccataattaaataaaattattctgactagaggaatagggcttcttaatagatcggttttgggtctcattcgggccttaggaaaaggtcacaaaattgaagtgacctcaggattacatggcatagtggacagttaaaaccctaagaaagaaatgctcgccaggaactcaacagaaatccacaattcattcttctcagaggatttggggatctagtcttttatatttcttttcttttttttcttattttgagacagagtcttgctctgtttccccagctggggtgcagtggcgtgatcacagcttactgcagccttgatctccccaggctgaaggagtcctcccacctcagcctcccatgtagctggaactgtaggtgtgtgccaccatgcccagctaattttttttttttttttagtattttgtagagattgggtctcactctattccccaggcaggtgtctaacttctgggctcaagcaatcctcctgtcttggcctcccaaaatgctgggattacaggcatgagccaccgtgtccagtctctcatatttttaatgactactacaaatcactactagattaaccaatataaactatattgtatttgataatttaagaatttcttccattttaaactgactacatttgaattctccagaatttaattccagttcagcattcccagtaatgaaacttcctaaaccaggcatcttgcattgtcttctgtttgtattatattttgccaaactcatgtttcctgcttttgctaatactgtcagtttcactcctaagcatttctggattcatctgctcatctacccaaatactactcaaaccttaaggtgaaaacacaaatttcaactactctgatagagcctttccaatacattttagtctgcattttgcaatatcttccccaaatacctatagatgacagagatttgggaattagttcctcaaagacttatatatatcttagaatcacattttgagctataattggtggaagagaagtgaggtaaaaaggagggtaaaggcaaatttgcgtgtccccaattttctaccctttatagccaatgcaattctgccttgcttttttgtctgaatgtttcaaaggagaattctttggttaagtaatatttcaaaattcctgaagcattttccagtctttatcaattatttaatgcattattataaactattatttgatcaatacctgaaaatattttttctctgcaataacaatataagttcctcagttagaggacttgtgtgttttgttttttatttttatctttgtattttaaatgcaaatcctatgttatgcaaaaacactaaatcaattaaaaattcattttaccacataaaaagaagctatgggatactggatatataaaagtaattttaaagtacttatgcatatacttcagaacaaggttatacaagataaatgcaaacaattttatctgtcatttaaaaataaacaaatagaaagctaactgactagctgttagagaaaagtaataaaattgccaccctcaaagagaaaaaaagtaatttcagtaactctcacaattaaatatttatcagaaataaagataacatgtttctgagattataagaaaacctaaaagtacataatttatttgtgtattagggttctctagagggacagaataggacagatctctctctctacacacacgcacacacacacacacacacacacacacacgcacacacacacatatatatatatatatatctctttgtcctgtgctggatgttttctgccttcaaatatcggactccaagttcttcagttttgagacttgaacttttaaggtcgtgaaacaattctatataatattgtgattgtggacatagcacactaaacatttgtgaaaatccacagaccttttcagcacaaataatgatccttaaagaaattattttaggaagctggaggatcccaaaatgtaaccttactgtattacaaaataatgatctttaaataaattattttaggaagctgcaggatcccagaatgtaacctgactaaattacaaatgtatgaaacaaccttactcaagaaggtggaggataaaagtgctgacttcattaattaattttggaaatgagttgaatccatgaaaccaaaggcagaaggaactttttataaatcctacataatagttgatagtgttggattgtatcacaaagtataaaagaaaaacccatgagtgcatactggtatcaattaattattttatatataaataaatgcaggagaatagaaaaatctcccacacagaaggatttcaaataatttatgtagatacgctgccctcagggaagtggggcctaactcctcacttcttatgtttaggctgcctatgttcactttgctgtaaagagaacagtacagacagggagtaaaagaataactttatggcggagaaatctgacaaacactatctcacccaggtaatcaaagctaacatccacagagataagttatgttgataagatgcatccttgagatggtgtaatgtaaatgacactttacctctgtggtcttcctcccaaaaactcataaccccagtctaataatttaaataaacaaacaaaaatttccaacaaataccagtaaagcagcattctacaaactaccatctgtaatactcaaaactatctaggtcatcaaaaacaaaaaagatccaagaacttgccacagacaagacggtccttaggagtcataataactaaatgtggtaggatgtattgaatggaatcctagtatcaaaagaataactttagtaagaagtgagaaaaacctgaataaatgatgtactttagttaatagtaatctatcaatgtcggttcattaatggtgacaaatatataccatactaatgtgagatgttaataagagaggaaacagcatgggaggtataagggcactctgtgctatctttccttttttttttttgcaactctaaagatattctaaattgaaagtttattaaaaacaaattagcattttccaaacttattgacagtaggctttattttgcaaaacacaacacacgtgcaaaagaatcccttgagtgcttggtttgacagatgttcttaaaaacattttttagcgtaaataattgaaagtgttaaaggaatacttgggaaaaaacagtatcttaaagaggggcagggaaggtaaaattgcaactaaccaagcctgtttatcaggatagtccattatggagttaaattctatgggaaaaagactcacattaagaagcagagaaactgtttccatgagtgtatctttaaaaagttaaattataaacttcattaacagtgaaataatgtgatttaattactacaggggtttagcacatgcagagaactcattttttgaatggataaataagtacggttagggatcaataaatgataccccaaaacatggcgctttggtatgatgagaactttgaactgaaggacattggaagggcctcagaagcaaagtctggttctgaccttctcctgctcttctttctcctgcttcccttccttcctcaagccagcccaaaaatctagaattcctcttccccaaggcaggtcagagaaacaagaacccctatcccccagagccgccataaaacctagaaatattgctctaaacttctgttgcctttctctgtaagggctgtccataagaaattctctcacctatcttgtctgaaggtacatcacgagaccatcattgaagaaggggttctgccctatacctgggagaaggaaggtcacacagaaaggccataaagaatctgaacagacagggcttgcttgctttcccctctcagtctattcctgttatatcattccatttttgtccaatcacagttccacacgactgtccattctgcatcaaacctaaacataaagataccatttgacccagcaatcccattactgggtatatacccaaaggattataaatcattctactataaagacatatgcacatgtatatttactgcagcactatttacaatagcaaagacttggaaccaacccaaatgcccatcaatgatagactggataaataaaatatggcacatatacaccatggaatactacgcagccataaaaaagaatgagttcatgtcctttgcagggacatggatgaagctggaaaccatcatcctcagcaaactaacacaggaacagaaaaccgaacaccacatgttctcactcataagtgggaattgaacaatgagaacacacagacacagggaggggaacatcacacactggggcctgtcagggggtggggggcaagggagggatagcattaggacaaatacctaatacatgcggggcttaaaacctgaatgacgggttgataggtgcagcaaaccaccatggcacatgtatgcctcagtaataaacctgcacattgagcacatgtatcccagaacttaaagtataatttaaaaaaaggaatttagggaaaatagccattctaaacactaaagtattatcaatacttaaaaaataaaaaataaaataaaaaatacatagattgttttcccttgggtctttgagtcttcatgtctaaagattctcatgtcagataaaaccttgattaaaaaatttattatgtttttctcttgttaacctatcttttgttacaaaagtgtggccgtgacccttgtgatggcaaacaaaagatcacacctttctactctactgtactgtgaaccttaagataatttgtcttcaagatagtagcagtagaagatagtttttacttgacttactaaaattagtaacaagtaaagaccaatttgacaaattctctttggaatatcctgaaatccagctgtacttttcccttggagactttccttgcattaagtaattaactttggtgtatttgaccctttaggaaaaaggttaaaatattatgtcaggacaatatacacacccctatttcagcatggcttaaatattttggagaatatggttggttacatattcagcaacattccatttattatgttaattgccccatggaattgtcaattagttattgggctccccagtaaattattccaccgtaaaagaccaactctgtatttggaaaatatttcaatagatctgggctataccaattgctgttttttctcttctttgcctgccacagtgtggtgggaaaatgttaattttacccccaattttctcgagcaggtttttttttttttttttttttttgcgaagcaagggcttgcgattgttaatatctgtgctaccatggcctctaaagccagacattcctcctgaatattcccccaggccagacctttaattccaggatgaacaccaaggccagcaatcaataagttgattctccatctgcctttgacagaggaatcaccaggctgacaccagctagtctgggatcagctgtttccctgcctttgatctcctcagttagggctgtccaaactcccatgggcgtctgtttcagcttagatacaggccacatcatgctgataactcctccaaggcctattgtagccattgtatttgaggaggggatcacctgtcagagtgactggttacaacccctccttgactgcgggaagcctttttgatgcagggcagatgataatgagagtctaattgagtgattaactaccttgactgacttggaggttttaatgacacctctacattaaggtctgcatttcccagcaggctcccagtttgtaactgtatggccatgatatttgcaattataagcctttcctttaaccagcagggatttaacaaatggacttggttaatcacagctagaaggccctcacatctgactttgttatggaaaaacatgtataaattcaagggcatgattgatttcttaatacagcccattccaggtccatggtcctatacgtaagacagatactatgtttttcagaagacatggaaactaacaaaaatatgtgaccgatgtacgtttcaatagaataaaatgaccttaaagataagtgctggtttttaagagttgccacgcacatgatccttctaagcgatgaaagtctgcctagatatactgtctttaattaagtgagtctgaagggcctattaatgcaatgttaaaaggaaccagtctcagcgggtcctcacagtgggaaaagtatctagggctttcaatttacaaggtcttgttacaaaagtgccctgctgttctggtcctgttctttctgcctgggagcaatttaatgatctgctttagagcagagaaatggtcagagagaaaacgttcaggtttatgtgttagcgatcaaatgcccagtggaatttacaatggtaaccagacacttccttttcacagcaaagtagagcagggacaatgacatcaatacatttgatttgaaaaactctaattgaacaaaatggtaagccttcagtgaatgtttgctgataaatatgaggctgatactgagcatgaagccaacacaaacgatacagacaacaagggtgatgaaaaagaaaaaggagaaagagaatgaaaattaggaaagacaaattcttcaaggataaaaagaggtcttttgacttgaaagtttcttaattaatttgttcttcatttattcgacattattcaagcaatattcaaaataatctatcatgttccaggccttctattgaatatgctggagcaacagctgtccagaaagcactcgtggcaagtgaggaatgcatgtatttttctcctttattcatttaagaaatccttggtaaatggttacaatgggacaggtatgatgatactctgttgataataatttaagtacctatatttcccagaactaagatgaagggggcctagaaaatccttgaatgaatacataggtgaatatttgctgaaagagtcctagcccagttaatgtgcttctagttgaaatcacgaacacaaaacaaatactgatgatgaaatgcaataaaaaatccataggtatttgtgcatcatgttagggacccatgggaaagaggcttactaactctccataactgaagtaagaaaacacagactatgtgaaatttcaatgcatgtgatgagtactattagggtactgttagacaggtgaaaattctgggtctgagatgagttttggacatctgtgttttttaaaataacgactgtaatatgtaaaaaaaaaaaaaagttttcattttacagatctggaaagcctttatttccaaagaaactattataaactgaatgccgtaagaagaattgcagaattttacattttcaattctcaaaccactgccttaccttagaataacatattagaataacaggaaggtaggtggaccaagtggatgcttacattttggaatttaaggaaacactgtgagatattaactctaccttcttatctgcactacactttcatcactagaattattctgtcttccagtaaaaatgaaaaggtttcaggactgttactacggcagtccaaaacaactttgaaattttctttagtcttgtccgaatactatagtctacattctcagattaaccttttctgacctttaaacatactgtataccagaaatggttctgtaataagaggaattagaccattaccttgagcacgaaaaggtcaagtcctactctaggctaacagcctcagtctaacttaataattcaagaattatttgcattcaaagattgtttaccctcttcatacagtattttaatgttaagggtggatgtagtagttgggatggcaaatttactgagtttattaagctgggcattgtcagatatttatttaaaaaaattagaaagtcttacatagtatgcaaaatataaaacatggggaacattgcttctctgcaagaatagttactgcacgtttcttactagatagagagtgagcatctttaacacatggttggagtaattgaaccacttgtgaactcaaccgatgagaattcagcaaagctctggctgggtgtgttggctcatgcctataattccaacactttaggaggcccaggtgggaggatcacttgcggccaggagtggaattcagcaaagctctggctggctgtgttggttcatgcctgtaattccaacactttaggaggcccaggtgggaggatcacttgaggccaggagttccagaccagcctgggcaacaaagcaagatctctgtctctccaaaacagcaacaacaaacactctgaccattggttactcagatatattgttgtttgttgacactgtatatcaaaactctagattttagcaaatacagtaatgacatggcactctacaagcaaatacatagatagtaaaagcaaatcagtaacgacaatcactcagtaagattataaggcatatttatcacgtacaaaaataggtccttttagtgggaaagttgagaggggcagataacttgagtcaggtcaggcaaaaaaaggtaaaaattggtgactttggaaaaatgcaaaatgattatatgttatttgacttaaggtctctgacatgctgtgtctaaaaaggggcactgctctgcaccttggtttttatgatgagttgggtattgggtagggacagattaattaagacaataatgtgtctcaaatcactatttagttgcaaaaaatattactaagcttctttgatctctcttgacacttttaaaaaactcatgttctatccggaatgtgtcccttctttgcaactggaaaatgcccagtgacataacttgccctacaaatgacctcacatgacaatctccattatgtgtacattttctatagtgccttgggctttcatatgatgagattggatatcagtataggtttccctacaaatcatgaattgggataaaaattaagtcaatggaatcaatccaaagttataactcataagatgttcagttaaagagcaaccctctatttcttgaagttgtgtatataagatttgtaccctgtgatgttattaggttattccacatgcagcatttgctttagttatttattttctctgttcaaatattgaaaatctctctaggcaacaatatttcttatccgtaaatgcatccttatcagaatctttaagcaaaagaagtattcatttgggctatacaaaattcaggcccacattttgcatgaatctaacagaatcttatccaaataataatttaaaatgaacagagcatgtcttttctcttttagaaatacaacttagagaacttcatctgggagatgtatacatccatgtatacacacacacagtagctgcattacccacaagcaataatttcacacttgtgacaaccatcacataatctgtggtgggaatgagaagaacatatttttaagagattgaaaacattgaatgtttatcatcctaccctgtaggaaggagagtgaacattctagtttattagaaaaatcactagccattacttgttttgtaaaatcaccgttactgccttgtaacagtaaggaaaggatcttgctcgataacagtgcagaataaaccttggatatttagttttataaatagtgaaatgcagcccatacagaatgaaccctagagatttaattttataaatagtgaaatgaaagcccagagagaaggaatgactcctttaccatcacagagctatttggtggcctcgctgacattaaaacccatgttttcttgatacgccatcctgtttttctgtttccaatacactacttttccttttacttaaatatgaatgtgaattgtgtgaaaaaaaaatactagcattcctcctggaagaaagaagctcaagtccactagcaagcttgtcattgatttgggtcgggtccgattggaatttggtagaaatgtggtttgctttatttggctgggagcagttctctgtaacctaaggattcattagtttgaagtgctggccttttgcctctttccaaggccattttagatgcagattgtaccccagacatcatttttaagtgacaggaaaatctctggagataacaagaatcagtctgtgaaatttatagaccttttgcattttctaatccttcttgatgaataactcagtttccagccagggtttgaatttaagagttgataaagcatcagttcaagctgctggctactaaatcaatgcaagcaatggcttaatcagcctttctgctcccccctacgaccttcccacagagttccgtcagatttctatggaagcaggtcagcaagaggcagacaccctgacaagcccatttgtagccattagatagcatgggaagagaatgctgagcagcagcgtggttgaagatactggtattctggggagcaggactgaaagcattgacttggagattacttgagtttgggaaagagatgtgaataagatggggagtattatggcaaaatggggaagagacaaaaaattatgatagaattctaacaatttggtgcatttatagagaagaaatgatcgatgatgctgtgtacttggctggctcttgtaataggacttcatgcctgggagcaaaatacacaacaaattaaagagggccctttgtaaacccttgtgagaggggactgagtgggagagtagcatttgagtgagaatgggttctctttagttattttcttcaggatttgattatggaaattttcatgttcttcccccgccacgtccccaaatccccatcttctcctggcaatttgacaaaagtttccacttttgtgaaaccaaagtttttgtgaaacccatagtttcatgggcagattgaggttctatagagagatctgtattgccatggaaggatgcgctgatgtgatagtttgccttattaaaatgttgttcatgcaagtatggagtttggttgcaattgagaaaaaaaatgtaactaaggcatctggcgtttaactgattaggtatctttttgtacccagaaccatgaagaaacactggtcccgctctggtttttccactcatgtgcataggtatgttgatagttcatgaatctgcaatgactttctaaaccagattcttggaacatacaagaagatagtctgagctaggtgatggggtcactgtgataagatgctgagtctaggaaataaaggtgtggttttctctagcctgcttcttacagtctgagtggttgtcaggggaaaggtttttgttttgttccttccaacgtttctttttaggctcaaggggtaccggtgcaggcttgttacatgggtaaattgagtgttccaggggttgcttttgtttttgtttttgagacagggtctcactgtgtcacccagactggagtgcaatggtgggtccctggctcactgcctcctcgatcccctgggctcaagggatcctcccaccttagccccctgagtagcttgaactgcaagctcaggtcaccacatcctgctaactttttaaatcttttgtagaaatagggtctcacaacattgcccaggctggtcttgaactcctgagctgaagccatcctccggcctcggcctccgaaagtgctgggattacaggtatgagccaccatgcctatctggaacagtgtgttacttgactaagaataaatctaccataagagatgaagacgtctattttttattgaggatcggtgttaccctaaatcttcaatgctgaagtgcattcgttattctgaaaacttgctatttaaagtgtgactcatggacgagcagcagcaacacctcctgagagcttttgaaaagcacaaaatctcaaatctcaacccaaacttactaaataagaacatgtaacttaaccagattttcaagtacgtcagatggacctgaaagctttggaagcactgtttttaaaaagtgcaaggtaaagcttttcttcatcaagggtcttgggttttccggatttttgttcccaggcaacccaaatatctgtggttgaattcatctctttacagacaaacaccttctattgtaacttaaatttttcaaaccaattgtcatgtgcatgagatactcatggttttaaataactcagatggattgaggctctctctctctcctctctggaggattaaacctatcagtccataaatcttcagtattttagtatgaagacaaaagcactttctctgactggtttaaggatctccacagagatcaggagtggagagatctgtattctcaggcataaacgtgagatttgattggcagggtgattgacagactggcatcttcgatcctcatcggagccataaaagtgtcctcaaagtttttaccaaaaacttaatgcagtggcatctgtgacaaaaatgtaagtaccgtttccacattaaaatttcacaatttagaatttagactgcattaaattttgcctagatggaaggacatctaaaaacaaaacatatttttcatcttttcaagggaatgtacttaagtaggtacaaagaactttgtggccagatggaagtttgtttaataaaccaaaaatttgctcttaaaaccaagttcctttttttagtggattttaaataaattactgaacaaacaaatatttacttttagccaattgctacagtaggagagagaaataataggttttcttagtaataattcttggattttcatgtatacacttagatctccactgcttcatttcaaactcaggaaaaatatctatgattattgatataaactagtttccctggagttttaaaaatattttctttcaaattatttttcatatccaaatttagagagcaaatgatccaatccttccttttgatggcaaagaagaaacatacagcataaaggaatgttaagttaggcatgctcagattcaaattggttttctgaatgagagtaaatgataattattactaatcataataatatttagataaagaaaatattgtagctttaatgttttaacaatgttgtgtttttgggggttagaataacagtattccttatggatgtaaactaattttttagatcccatagatagttgaattttaaaaaaactagaggaaattgtcaacgtatctttcagtttctgctttaaatgtgtctgaatatttttttcatttatgattttcttatgaccattgtcacagcaacagatacaaagtgagacattcactgaaatggcaactcatagtattcatctttatgtcatgcctctaagtattgaaattttataatgagaagtaaccagggatgattcgttagttcatctgtttgcctgtctatctataatacatcatctatttatttttaggagtgacatttttaacagataacttaaatagatgtgatttaactaagccattaaaaaccagttgattgtgggagttattgttcaatgggtgtaaagattcaattatgcaagatgagtaaattctagaaatctgctgtgcaacatggtgccacggttaacaatactgtattgtgcacgtaaaaaatgtttgttaaagcgaggaatctcaggttaggtcttcttacacacacacacacacacacagcaacaaaatcccaaaggggcacaaggaaactaacttttggaggtgacagatgtttatcttgattttggtagtggtttcacaggtgtatccatgtccaaactaatcaaattgtacgcattaaatacatatggttttctatataccagctatacctcaatgaagctgccaaaataacaatgacaagaaaaagtagttaattatggactacaaaattaaggaatccaccccatatggtgcataccactggggaagattggtctaaaagaggccactctgtcatatagtcaatcgttaagtgaaaagagggtaagaaatttttctataataattcatcttttatttttgtttgtttgcttttgttaactgactaaattatatctgaagataatctcttattcttccatcccttaagcacccactgataccctcccataccacttagaatgaaatctgaatttcttacattgattttgaaagttctctgtaatctggcctctttcatatgacaagtccctactctgccatcctttccatgttggctttttgctccttacactcttgaactctgactgcttctaaagtacccagcactggcctctcccactatctgaaatagccttacaactgatggtccaggactccacgtagccaaccaggggtctgcttaagtatcactatatcccaatggcctctgctggccctcaaatccacagtagatattgttgcctttctgtgacaatcctgactattctgtacctctctacaaagtacctatcatcatctaaaatctttcttttttattctttccttagtcatttaaaaaatgttgtcatttactgttctctctcctgaatagattataagatgcataagatcagggaccttgtctgtctcatcctctagcttctcatttccagggatgttgaagccacctagatatatgtcagggaaaggcaaagttgattatagacgggccacaaatgctgagtctgaggcccattttctaagcccatcctctacacaaatatcagtcacaggtgctcagtgctagctaacacatgggagcagttgtatcctggagacctatatacgattacaatctcctctttcatggataagcagcaagacatactatcaacttggtttggtaactgtcatgaaattattaactattgtgtcttaactcatctataaagaggcataggttaagtattttggaggtcagcaaagcaacaatctcccgtgcattcaggtcctctgattttttttctcacatacctacaatgtgctgataaataacagggttcaaaactggacagcaagtagattcaaacaggtatttcctgcatctctaggaaaacaaaactgagtgcatttgttttgtatgacaagtatactaccaataagaaaacttgcttctattatgtgcttgaataaactaaactgaaaaaagtaatttaatgcacacatatttatgattatgtaaataatgttgaaaaaggtattatttatgttaatttacaaaaataatcatattcattgcaaaacattatacaatatagaagcattgtattctccaggtttaaatgtttgagtatataagccaaactgaatgtaaatcattgaactttagagagttactatgagagtgagagagagtgtagttttactggctagccatttattcatattgttgaatgccatgtaaggactcactttttcacttgctccccaaactcccttctgctctgagatttaaccagtctgttctttaaatatctaagtaactgtgtggttattatgtttttccctaagaaatcttactttaaaaaaagatattactacctaaaactggaaaaaaaaatcctttcacaaattaaaggtatgagctagcaaatcatcagcagagagaagtttataagaatcaacagaaatggaatattcagagttaagttttcagaggtgaggagcagggaccttggaaaagtcaaaaacattgagcttttctaggaagggtgagctcagctggaaatccagaatttgggtacatagtagaaaggctaaagagaaggaataggagtttctcagtacaagcaaatcaggcacattagaggtaaaccttgtcttttgcacgattttgccattgctaactgccagaaacgcaagagaagaaaagtgaagttgatgaaatttttggaacaacctggttcatagattttgaaatagtggagtcatgtgccaccttttagtcattcctggcttttaagtttctgggcaaaggtcaataatcacatggaaagtacacaaagtaataaatgtcttgaaggactggccagtcatggtggtcagtcttctatgcaatgtctgttactcgggggccccacctgagcatggctcatgagaaaatgctcctcccttctcagggtcctcacataggagctgtgtctgctgtctgagcagcccatggagtaaaaggacttcaggagtcccatgagtcacaagaatcacttcttgctccagagacaatcttggctggtttgacaactttaagaagtttggcaaaataactcatggccttccctatatcttgacctctccctaaactctcttcttcattaaaagtgatgttcttgcttagaacgtatattccaaaacaacgtgtgtcaaaagtcagttgtaagtttttttccatttcttgtctgttggattggtttggttttaattagatatttgtactatgaagttgaaccctgaaatggagagttccatacaagatctcatggtaaaaagtttcatgaggagcacaaatccacgatggctcttgacacttagacaaggccctgttttcttctgaaaacctacatgtatgaagctgggtcctctctgttccacaagatctacataagattggacccatagtcaatttcaagcccaaggaaagcaaaagcccactgcagtgttttgtccctttagaactcataatttcattttcttacccaggtccaactatgtatagccaacacaccagcctggcaagaagatagcgttgctgcaattaaccatttgttcctctttatacctatagatgcaaaaattctgccatttaataatattcacacttcttagaagaaactcattgctcaaatgacaatttaactcttttattacaccaatagtataaaatggacaatctttcccaagatcatttgcatgtctaagtgaacgaaaatgtgtcttttttcctcttctggtcttcaacaacagaggtttgctcaatcttaaaatgagtgtgtaggtaagtacttatttattttgaaggaagtttttgtttgtttgtttataatctcatcagaaatttctgctactgggatatttaaaaatatatacatttacaatgcttatagttctaaaagtacctaacatagtaccttagagattcaactgttaataaatggataggtgaatctactaaaacaagaacaaaaatatgccttaaagaaacatggcaaacaaacatttgaataaatgccagttctcttgtgccagttgcaatgggatgaaacaggtggttagatgtggtaatcctctaaattaattctcccattttctgttgagtgtattatagtttagatttttgttaggatttctccctgttgttccccagatttattattatagttatgtcttccttgggcactcattctcttactccagaaaactatgcagctgcaaataaattgaaatcagaagaaagcccggcttggcattcagaatcgatacacaaagtaaaaaatcaagtcaacccagagataactaagctcattggagttgcagaaacatcaatgcagtaataccatggaaaacacgtggaatctggtaagatctcttctccttgaggattcaggatcaagactctgggctgtagctttgcccccaaaaccctgaatggcagcagaaaaggctgtattgaagcaacttgtgtctttctaaatacgtcttacaaaataaaccccggttcagatactctgtttaaatttgaaaacaattttgtcaggaaatgtaaagcccgcgttacacttaacaagaaagtgtttatccaaagagttaatacagatgagtaatctcacactcacatgccagttctctggaggtggcattcctgtaaacagccagacactttgaacttacggttgtcactttatgtcatactccaaccactaaaacagcacacaactgtgcagttcttccctgttaatcgaaaacattcccacctcgtggaaaataaccctgaaaaaaaaaaaaaaaaacgagaaagaaaagcatctttctagagaaagtgcttgttcatctcttgagtattgattagtcttttcaccacttcaccttatttatgcctctagtataacatattgaatatttattcatctacgtctgcactagactgggtgctcctcgaaggcaaggatcattgcttattagtttttgtcttaactctgaacacagtactcactcagtaagcactcaacaagtgtttgttgagtgaatgaataaatacatttttattgtttcaatttattcactgtaacaaagtaactctaagaatagtaattagttttatattcaagcacagctgtttttaaatgtaagacttctccttagtacttttataattcagagcaattcacataaactctggttttagaattttgttgttgctgtttgttttgtatgtatgtgtgtgtgtttgtgtgtgtgtgtatatatatatctatacatctatacatatatatctatacatctatacatatatatatctatatatctatacatatatatctatatatgtatacatatatatctatatatgtatacatatatatgtatattatatatatatactagagcactctccctttaaagttatttgattgctataaacatatgggtatcagttattcagagagctgtctctattcatcaaattgcacagcaaatgtccatgaaatggcttggtaaatgtggaaatttttcacatcctaagaagacagtgttaaaagtctggagtaatttttagcctaggccaagtggttgggaacattagagtacattgtaggatttaatccttgccacaaacatagaaaaaccctgtacagagttgagatttatttatttttgtgtgggctgtgatttgtctttacattccaagagatgaattaaggcaggtaattgatttttttcagacctctcatcaagctggaagggagaaaagattaaaagaagagagacagtgagaatatttaaagcttacattatcaagatttgctgcttctcaattgccatgtccctgaggtgtttttgtcagttgtaagaagtgttgaaagtaagctgttatgaataataatagaaatttgtgaaaggttcatagatacaaatatatagaacttatgaaaaatgctttataatcatcttactgtaatttgctacattttttagtttaaataggtactctttgaatttttttttttctttgaaacagagtcttgcactgtcgcccagggtgtagtgcaactgctggatcttggctcactgcaatctccacctcccgggttcaagcgattctcccacctcagcctcccaagtagctaggattacaagtgtgcatcaccacagctgacattttgtatttttagtagagacagggctttaccatgttggccaggctggcgttgaactcctgacctcaagtgatcctccctcctctccctcctcggcttcccaaagtactgggattacaggcatgagccaccatgcctggcctgaattttgtattgagatttaatttacatgcactgaaataaatatacagatcttaagttcaatgagctttgacatagtgatacacccatgtgatccatatctcagtgaagaaaatagaacatcaccactatcttcgtgaaacctctttccccataatctctagcctccaatcccacatattggctttctacagggaaaagcttttatgatttcttttgccataaattaattttgcctattctggaatttcatataaattaaatcacacagcatatgctcatttgtatcaagcttctttaactcagcataatgtctgtgtgattcacccatattaccgcatattttagacatccatttctttttcattgccatgtgctatttaattatgagacccctgcaacatgtttaaacattttcttaatggacatttagactgtcttcgtttttgtctaaaagaaatagaactcctatgaatattcctgtacaagtttttgttagacatattttctgttattgtgggtaaattacctataaatggaattgctggatcatagactaggtgtgtataacttcatgagaaactgttccggtgatttccacggtggttgttgcattttatagtcttataggaacattagaaagttgtggttgcttctcattctccctaacatttggtgttgtatgactttttatcttagccattcaaatggacatgtagtgatatctttagtggctttaccttgcatttctttggtaactaataatgttaagcatttgtacgtatgcttattggaatttgtatcttttcctttttgaaatgtctgttcaagtgcttcatgtactgttaaaaagtaggttgttttgttgcattattagaattgtgtttatattccagatacaataatacaagtcctttgtcatatatatgtatggctgatattttctcccatctgtggctagcctgttcactttttttcagtgtcttttgatgagcagatgcttttaattttgatgaagttgaatttacaaaattttcattgcttaatgctttctaggttgtatctaagaaatatttgcctacctcaataatgtgaacttctcttacctctcttatgtaaactttatagcttcaactttttactttgaagcatgatctgtatcaaacttgtaactgtatgtggtgagaaagcaaaacataattttattttcttgtcaatatctaattgttcattcagttacaatttgtagagacaactctcatttttcctttgaattattttggaaaatttgtcaaaatcaattggacataaaagttttggtttaatatttatatccaattctttttgacccaatctaccccaacactgagatgaatcaaaagggggtcattggtgatttttaattcttgctataaagaaaaatctctccattgcctatcaaattcacatcttggaagtactatacataaaagttctataatgtgatccatccttcctctctaagcattaaataagtgtactctcaaatgtgtggtgatactcagacatgcctcatgaatttacttttggtaacttaaatgtggtctctcaggcgttgctttgtttttttatctgtcttctctttgtaagagaggaaatttctttttccttgctcatactctgtgtgtaaagccagccctatcttttcagctcgaaccatttttgaccttaggctctagaagttaaaggaggtataataaaataagccaggtatcaccatcaagtcacccaagttgccgttctggctctaactttgaaagctctactcttgtctttcttcctggctgtgtccctggcttggttccctgcttagttctatgtggtagctctagatttcacctactccaggaactgaatcctttatctagaactgtctatctctcattgtctcttattcctagaacctacgtccttacttctacctggcgttactgacaccccattactatgggcaagactcttggtgccaattgatatatagaccaacacctattttcagtgaccatatcttttatgagcactgttttacttcctcaactggaatttcttatcatatctatagctgatattgttccattaatgtaagaacaaggtgagttggcaattctagttccatatcacgttcttccctgacagctctttggacatcaggtcaaccccacaggtgaagtaggaaatggcagaggagaccgttgcaaactgaaataacagggcccagggaacaggtcccatgtgagtcctggcctaagcttgagatgcccacgccataagacagttctggacccagtcatctcaggctgttgaaaggggaattaaaaattttgaggcaagcactccaaagcacaaaccatcttcccctccaaccccagaccagtaaaccccacttgccaccctgatgtgtttaattgggccttgtctaattagatgcttagagagggctgcccacttattgaatgctaacacatggcataaggcacgcagggaggtagacatgcttaccctggttgccagtgacagggtacacacagagtaaagaatgcttatcatcacccctgctgatcttgggtgctacagactggaggtcccactgcagttggaacactgagaggagggaagagtggatatctaggcttatccatatgacccaagactaaggattgatggtggatggttgacccagagctccgaactcagcctctgtctaatatgaaagcacaaaacagtgctttgcatcatgctggcagcccacttttatgcagatacataaatgaaatatggtgccttcaagaggatgatttgcttgcccaccacccctctggaatgaggactcaaccctcagtgtgatataaagtcatgagaccctgagctcttctggcatcaggtcaaccccacaggtgaagtaggaagttgcagagcagacagctgcaaatggaaataacaggctgagggatcatgtcccatgtttgtcttggtctaagcttgagatgcctgcgccgtaagactgttctggactcagtcatctcaggcagttgaaaggtgaataaaaatttttgaggcaagcacttcaaagcacaaactaccttcccctccaaccccagacctgtaaaccctacttgccaagatctgactttattatcattcttatatagaagatttttttcctgtaattggtaagtctgtttttctccgtctctttgcaactttttgcccattcttcattctttatgtttttcaaattccacattctccataaaacttgactaatttctccaactatagatgatatctacctccattttgaactctggtattccattactatcttttcctttttttttttttttttgagttctttgtttgagaatagagttgttatttttttaaaacagggactatgttttattcatctttgtcttgcttagaaccgaggtaagtaatttttaaaaaatcaaatgaaagacatctaagaaggatttttcccctatattgtttttatggatacctaacaatagatttcttctaaaatttaacttagtcttttcccataggttgcattccaaagccctgaccctaaatgatgagagaaatgattcgttttggtgatctactctttccaccttgttttaacaatggatttagtttaagtaattgtaagctgctctaccaactaacttaggtgagattcatggattaaataggaataattgttcctctttatgaggtctttaggaaaataagtaatttgtatatggcatccatacaagtgctatttagtaaattgcagttggtgttaataaaggagatagattgcaataaacaccttctgaggaaatgacctctaatctactcctggccatatatgttatcctgaccacaaaacactaattattccagaatttcaaggaagactagctcattcacttcctctctgcctaaagggatatttcttctcagcctttaaccttcacctacttgtcaacctggaagtatttctcccaccagagaggaagttaaggaacaaggtatctagagagcatttaagttttcaggtgttcaataaatacctgaaggctaactacccagggttcagttacacttatgcaaaaacagagaataaagctacactgcacaattaacatacgtggtgaatgtaaacttggctatatttattgacatccttctcctggatttagaagtaacttgagatggctatatatatatatatatatatatatatatatatatatatatatatatatttaaataggtaggctgtactatttcagccaacacattttttttggctgaaaatatttaatatctctacttcaatatatatatatttgttaattgtcaattttaattagatggtgctacacgtgcctgataaaaatgattaacaataatgaaatctcaaatacagttggcttagagttcatgatttgccctacctcaggtccaattacaactctagccatttctaccatttcttaaaagatcttaaacatcttaaaggtagtttggtagtttaaggccctctacaggtagtttgacacatgaaattattaagctatacagtggaaggtgacgttgtgagttgaagcaaaagatcaaatactatgatgcactctatttcaatgctttccaactttatgccaacagtgtatgcaaattttagaaagaccacattaattacaacctggaagacagagtagaagtgcataagtgaagtcaaaagaaaaagcaaaagtctcttgacatattcaagagaagcttgaattgaaacgaaagcagaaacacatgagaggcgtaataagggatggatgttagaacatttaatagacatcatcatcaccttaagggtaatttagataaggaggtaagggaaaaggagaatttagcatgactctcaggtttctattctgtgcagctgaaacagggttgtatcattttttgagaaagagaggttggagaagcagcacaaatttgttctggaaaacaggctgagatgggctttgaacatgtttaatgcgctaatttgtgcaaatgtattaatttgtgcggcttctcaagtgtcaagaaatttgttgagcacaaaactctgtagtgcaagaaacttaactatgctcaggaaacattgaggattgttatcatttaacagacaagtgtgaagaactgttcatggaaaaggctaagaatgaccatagaggtttagaaaatgaccataagcaatggtgtcacagaattcaagggaagagaccaggtgcggtggctcacgcctgtaatcccagcactttgggaggctaaggcaggcggatcacgaggtcaggagttcaagaccatcctgggcaacatggtgaaaccctgtctctactaaaaatacaaaaattagctgggcgcagtggtgcgtgcctataatcccagctactagggaggctgaagcaggagaatcgcttgaccctgggaggcagaggttgcagtgagctgagattgtgccactgtactccagccggggtgacagagtgagactctgcctcaaataaataaataaataaacaaataaattcaagggaggatggagtttcaagaagcagaaagtccagagtggcaagtcatgtagaaaagtcatgttacaatagaaaggaaaagtgtccactagatattttgtcaaaatgcacactccagaattttgtgagaaccatggcatggatgttccagggtcaggctgatggccgggtagaagtgaatcgggagttaagtcattgcagagaggaagtaaataatcatcactcaaaacgttttgctgtagaagagaaatatggtgtcatgggagtacttatggacatatatatatttttccattttagtggtatatttagaatatttttatgtttagaagaagaaaatgttggtggctctgattacaagattgaagagaaatgttaaagagaggtttgaggagaggtgacgcaaaacacagcaagaagaattaaatttagacagaagagggaaccctccttctcagagaagggaggataggtggaaagacaaataactaaataaaattgttctttatttcctttggaaatcccagacagtaaagaaacacaatttcattgaccaataattgatgatgccatgtcgaagtgtctccacctggcaggaagagcatatgatttaaggcagataatctgcctccctctctgctttgggaccattagatttgggggaaaaaatggacttggtgagttggggaggtggtggggagaaatgaactctccctgggtccattctcactatatttttattctctatggaagagaacagatgttctcttttttgttgagaaagcaccatgcttcctcctcaacttcattttgaacaggaggtttcaagagaggccacccacagctctgagtgttcccactgagaggaaaaataaatgccaaacccatgtgcactgagcaagaaaaagcagctgaaaaaaaattactccaactttatagccagacctgcttggctagcatagaggcaaattaagcttaccaaacatttttttttttaaccatcaatagttcattgccgttgataacagacaaccaaatatctaattcatgatagtccaatttactaaacccaagaagtggaagctcttggaaaagtatgacttttttttttttcctggagattcatatgctaatggggaggggacagaacttagaatgtaaagtagtcaaaaggtatgaataatatcaataatgaccagagggctttatcacaggagagtagatagggactgagaatccttggagtcaaaaaatatatatacataggttagtatactggccactgactttgccaagtatagtcttgtgcatctttagggaaattacttaacactcctatgtatcaactctcttcaccataaaatgctcaatctaacagcatcttcctgataagattacatgaatgaatacatatagcacatatacctatagtttgtattttatgtaattttaatttgttattataaatattttgcagcatgtttacttatttattattacttagttttgatccatcagattcttgtcaggaaacagagtttatagtttcctacaaactttaaaatggagacactttaaagaaatacatacagtgaggaaagcgggagaagggacaggaaagtgtggagagactcagcaattaaggaaagctattacgccccaagggacacagagatcaaacagggtcagaggcaactatcagagggaagacctggacactggaatcatgcaaagggaccaccctagagggggtgctaagtcatgaaggtacaaagctcctgcgagagacttggtgtctacacaggaagaagaaggagaaaaaacatttactcttattgtctctacccttagacccttttcagtgactgccattggctaaagccaaaagaatccaaccaacaaagggagtgtggttgatgccttcagcaaaagtcacagagcatgatgaagaagagaatagaaaagacctgaatcagaataacactaagttaagcactaaagatagctcatagcaaaccataaaagcttaataaatattactgaaaattatttaactatcaagctgatgatattgatgaagaagatgatgataatgaccatgtagtatagaaaaacccaaagaaggagtttgaagtatgccgatattttttttttcagacaaaaattgtaagtgttagacatatggctgggttctgaacatgccaacattgatacgagattttatcttcaagaaattacacagaatctatggaggagacagatattaaatagttataatacagtgtgagatattctgtttggagagatatatattcagcccttaggatagaaaaagaattcagtaataattgcagaatttttacacaagctggattgtgaaggacacataatgattttgtagtgaataaaaaagtctttgtgatttgcttatcaaggtagcttgaaattcacattctaatctactgatttaataactaaaggattgtttcacatgggattgagcataattctcagaagtaattttcataaaatacatgttactaaaataatgttaatcaatcaattaaatgttcatcaaatgctaatttaattggtattaaaaaacagctctggtcattcactccaagattgagttcttaattttaggcttaaagactctggaaagaaacaagaaccaaggacagtcacatgatccagaaaggaaaacattgcttatgggccatatgcttttctaagcctcaggactttattgtggctaaagcaagaacacatcaatatgtgggataagaaacctctgaaagtgcatttcattatctgaaagaatcaaaacagtgaagaagagtgaatttatctacatattgaaagagattcagtgagtaatttgtccagtctctttcttatctaatttaatccaaacaccacccattgatggggagtttcaattttcagtattttagcctaatgctcaggaaggaatgccagtgaacatggacttgtggctttaagtgactaatcatagcaactgctatacaaacatgtaaggaaaagccaacagactatgatgaatgagaaacttccttatatttcattcctttggtgctttttttccttcttcctttctcttctctaaacattttttcttttttttttttttgacagagtctaattctgtcacacaggctggagtgcagtggagcaatctggcctcactgcaacctctgtctccgggttcaagccatcctctcacctcaccctcctgagtagctgggagtacaggtgtgcaccaccatgaccagctattttttttttttttttttttttttgtagagacagggtttcaccatgttgcccaggctggtctcaaactcctgacctcaagtgcctcccaaagtgctgagattacaggtgtaaactactgtgccctgccctctaaacatttttttctaagcgactccaagactgcatgttcaattgagatgacaggcagtggagttctgtgggccacacggatgttatttgtttgggggtagctgacacatcatcagaaactttcatattatttagtatgcgaagaatagactgatggaaatggaatatagcagttggtggaaggaaagaaatgatgagaccaattgtaaaactccacatccaaggcatgatgggtgaaatttactcagagatcttgctggaaatctcattccatgatgtagatggggtgtgaaggcatcgtggccattattactcacaccccctgcagttgaagacaatccataccctctgtaggctgatctacatgaatacaaacacagagacacctcctccacagaaacaccatgaaatgtggtcttccactaaatatcagacagttgaaagaggaatccaagaatctcaattatttgcacatgtaggaggaaaaaaatggatctttcagtatacttatgctacctataacctctacttcctaactgtggatatgggaagaataatttgggctttcttatgcctgctgaacaaattttgggttatttcatgaacatttattattaaataagaaaatttaaattatataacctgattgattctttaaggtctgtgttttaagtaagaaaccagcttatgattttcacaggttttctacaaagaaactattatatcaggtgcatggctcatgcctgtaattctagcattttggaaagccaaggcaaaaagattctatgagtctaggagtttgagaccagcttgggtaacacagggagacgccatctctacaaaaaaaaaaaaattaaaaaattagccaggcatggtggtgcatgagtgttatcctagctactcaggaggctgaaaagggaggattgcttgagcctgggaggttgaggctgcagtgagtcatcattacgccactgcccttgagcctgggcaattgagcaagatctcatctcaaaataaaataaatagaataaaatagaaactattaagtccatttatgccaatgtactagattcattatgcattgactataataccagtgttaatgtgtcatgggaagaaaatgtaatcacaatttagtattgataatggcatttactatcctctaggaggaagaatctagaactaaaggtaacctgtggataaagaatttgaaaatcttcaggttgtggtccatgtataattttagaatttacattttatccagccagtgggatgatgggggcgtcagatgtattggcatggttcaaaagatatgtctattccctgaggaatgctgagttcctgcattaataaataaacagctgagtagagccataaatcaggttataagtagtaaaatgtaattaaagtaataaagtgaaaagaacgctgaataaagcatctgaacagcttccctttttatttattaagtgaggtcttaccttctttatgcttaacttaaaatcagaagcacttccttaattgttactatttttttacttccttaaaatggcgggttttttctcccaatacacgttactgaggtatctttagaaacttctcaaataatatttagtgtgtagctttcatacgtatcactagaaacattttcactcatatttaaaaataagcttgaacttatatttaagaatgtatgtcttctaaataataaagattgaagataactagaagtcattttatacaatttcttcattttagcaataaggaaaacgggacacaaagaagccaagtagctagggccacataaatatttagaggcataatttaaggccaggtttcgtaattcttacgcggatggtgaaatacagaaaaaaaaaatgcgttggctttgatacatctccaattcccttaaccattatttctcaatactttctcattggcttatacttttggttcctgaaagttttggtgcttctatgtggtcagtgaactcggtctctggatcttctgaatttctttatctgcctcttcaaggctgtgctttctcctgttagtatagtgaaaggacagtacatgaggcctgaagcctttgaataatacccctgtttccccagcttggcagctttgctgaaacgaaccgttctacagaaggtgtttcttggatgtaaatggccaaccaaatgtatgcatactttaagggtaatttatggaggaaaaaagttaatgttacactatagttatatttgctaggtagagctggcaagcgattcaccaaaggcgtctgagtatattatttctctcttttgggaagttgaggaaaaaaggaaggaagagtttggaatttcgtttcagtcttgagatcctgataaaagctgactcaggagttcaaaagaagaagagccaatattaacaacgttgtctatcttcacattatttttgccttaatatttgaggttgccttgcacttgaaaagtagtaaaataaatagtcacaattgaccttcggtttgtcataaagttataacctgctctgagtaacatgttgaaagacaaacttaaatcacagataaacaaaattatttactttaaaaggtattcacaggctgggtgtggtggatcacgcctgtaatttcagcactttgggaggccgagggatcacgaggtcaggagactgagaccaccctggctaacacggtgaaaccctgtctctactaaaaatacaaaaaaaaaaaaaaaaaaaaaaaaaaaaaaaattagccaggcgtggtggcacacacctgtaatcctagctactcgggaggctgaggcaggagaattgcttgaatccaggaggtggaggttgcagtgagctgagatcgtgccactgtactccagcctgggcgacagagcaagaatccatctcaaaaaaaaaaaaaaaaaaaaagatattcacagtagtgtacttgtaatgtgaacaggttcttcttaaggttaaatatgttccaagatacaaaacttttgtttgaaagtcaaagcctctgtattgcttctactcctctttccccaatttatcacccccttcaccttcctggctgcaggcaatcttttatggtttagtttcattgtccataatatctaaataaaatttattatgatacaaatactgtagacatatatagtatgacatattataatgataaattcactgtgttttcagaattagaatatctataaagtaaaacaaattaggccaggtgcagtggctcatacttgaaatctcagcacttcgggagactgaggcaggagcctagcttgagctcgggagttcaagaccagctggggcaatgttgcatcatcatgtctctaccaaaaaaaattaataaataaaaaaatataaaattagcctgatgtggtggcaggtacctgtagttctagctacttgagaggctgaggtgggaggattatttgtgcccaggagttccagtctgcagtgagccatgtttgtgccactgtactcactccagcctggacgagagagtgagactctgtctctaaccaaatataataaaataaaataaataataaaaataaaataaaataaatcagttcagaaataaaatcagaatgggaattgtctttagatattgaacctcagtttgctcatctgttaagacatgataaatcaatgtaaaaatatctccatttaatggtttctaacaattgaaactaaaagtatatttcacatatacaaattttggataatgtttccatggatttttgtataaaataaaagataataatgatagcatcaggaagggattaacatcttatttaaaagaacttctcatataaatttaattggaaaaaatatttataacttttatcttcgtcaatatccaaatgaaccaaagaagtgcttaagaacttagtaagaaaatacataatttcatgtatttcaaagctctaggcaggtcactgcatgtgctggccatggtccaacatcttggaaaggctaatttattctacaggaggaaatggaaagagttatttattttttgctatttgttttcttttttagttttagtttttgtttttcttttgcctctaagaggaacaaagcacgaggggagaaacagggaaaggaggaagttcaagaggagggctgaacaataaggcaggaggttgaagcttcagttgtgctactagccaatctactttactcagcaatttatttccctagataatccacatctcttccagttcatttgtctcactatttacccttatattagcaagtgatttctcttcctactttgctgaagaaatagaagacagctgatgagaacaacctcaaattatatccacctctaattaaaaacatattggaatctccactttccactttacatcagataagagtaaagttctcctccttttcaagtatgatgccccttcacaacctggtctatagatcctctgtttttctgtaggctcagcccactgccatataatcatgtcattacaaagcatcaaaacttgttgaccttctaatctcattcaattctcttctcaacctctgatatggtttagctctctgtccccacccaaatctcaccttgaattataataatccccaggtgtcgtgcgagggacccagtgggaggtaattgaatgatgggggcaggtttttcccgtgctattctcgtaatagtgaataagtctcacacgatctgatggttttataaaggggagttcccctgcttatgttctcttgcctgcctccatgtaagatgtgcctttgctctttcttcaccttccgccatgattgtgaggcctccccagccatgtgaaactgtaagtccattaaacctctttcttttataaattacccagtctcaggtatgtctttattagcaacatgagaatggactaatacaacctcttaatcttgggttcatctacaacaagtgtgttaaaatactattttcaatttaccactgacttatttgtttaagtcaatgatgtttttcctttggcacttgagccctgatatggttagactttgtgtccctacccaaatctcatcatgaattgtcattcccatgtatcaagggaggaatctgatggatggtgactggattatggggagtggtttcccctatgctgttctcatgatagtgagtgagtctcatgagatctgatggttttaaaagtggcagctttctgtgcttgcactcttctcactcctgctgccatgtgaagaaagtgccttgcttcctctttgcctttcatcatggttgttaagtttcctgaggcctcccaagccatgtggaactgtgagccaattaaacctctttcctttataaattacccagactcgggtagtatctttatagtgtaagaacagaacaatataagctctttgcagaaggtgacaatcttgtgctttttctccattgtcccacatggttaaagtagaatgctttattctacatgtctttctagagtgattcccacatccatgacttcaactagtactgatatgcccatactcttgtcccaaactttaagctactgtatctattctttctaccaacttggtcaactgaaagtccccaaagtaactgaacctcaaaatgtctacaattcagtcactcttacttctcctgcctctttaaatgtgattccttttattcctaagcttgtggaaatggcattaacatacagaaaatctcctaagccagaaatctgggacaatttcttcttcattatcaccacatcatataccatgaggctctcaggccatagagccttgggtttttcctgtggatgataggatgcccctgtagggttttcaagcaggagaaagacatggccagagttttgtttgaggagaacactcagatggcattgtggaagatggattgcatgggggaagctataaaagaagctataaactaggttggagatggtcccacttgtggaagttactgatgttgggacctgttctagaattttggaagttggaataaagagtaacacacacatttgagaaatgtttgagatggatgtctgagaaattactttaaataaaatctaaactttacaacatttatctgacatgaaacacggtaacatgatttgtttcacacccaacacgttgctgctatcattcaggctgttagaatttcccattccaagatgttgacttccaccaccaccctaccatgcatgcctgtgcacgtacaatgcaaatgctcacacccctacacacacacacacacaaacacacacaaacacatacacacatacaaacacacagaagtagtgtgtgtatctacttttagatgactcctgtatctagtcccttctctatattaatattttattgtcctcattatttcttctccagaataatgcaattgcctctttttgctaatgtaaattcgattatcacaccaaactactgttaagaaatatgaatatgatcctattatttttaccaagtgcaatacttctgttgttccctagacacaatcatgtcaaaactactcggtataacattgcatctatcatttaacatctgcctatttctatgactccatctcctcctcttatcttacaaaacatccaatattctagctatacagttgacgtttcttgaatgtgtcatattctaagcgggggtctctcaacattttagtcttgctttgtcccttcctggaacctcttctcatgttctctgcatgactgacatttcttgaatgtgccatattctaagaggtttctgaacatctggggcttgcattgtctctttctggaacgtctttacatattctctgcatgagtcccagaaatataagctacatatatgtgtgtgtgtatgttatatatacatgaatgatatgtatatatatatacataagatatatgtatatatttgtatgtacaaatacatttacacatatatgtatataaacatggtgtactgtatatatgttacatgttacatataagtgtatatacatatataaaatattcatttctacaagttaactagattcaaatgtacaaggatcttttccagagcgccttcctggtacttttatgctgaatctgatttttctaatctgctttttcatactacattttataaagttataattgatatcactgcattttaattattgagttcaccattttcctttcccactaaaatatgaaatcctcaaagtcctagttttcctcttccacatctatatcctaaaaacctaaaagaaagtctagcagatattcagtaaatatttattgaataaaccacactactaaagttccagataagatgcacatatatgattgtaggctatattgaagttcacatcagcagctggagaaaggaagtcaattcgttaacaaggttttatttattattatgctgccaagattaattttatctctttgctttcatgtaagttactgtgcttaggataaaatggtgacctcacgtttgaatttcactaattttgcctttcacagcagggaactagactaagtcagcatttttatgtcctaaactaccttcaagacataaggtcttacttaaaataataaatgatcatccttcaagagtcaattagaatcagaatcataacaatttctttctggaaaagacagtcttaagagacatgtatttcaactgtagttgaactgactcataaatttgataattgttcttcctgctgtgaatgttagcttctattctacttttagcccaacatatatagttccttgcgactatagaatctgtgataatcactctaaattttatacaaaaatgtacacttatttagtggctgtttcagtcattcaaaacagtctggaaactaaaaaatttaaccaaataaaaatttcaaggggaaagtcatgttattgtttttcttcaaacatactgtttttagcctagagcaaaagtaaacgttaagtggtccctgcagggatatctgacatagagggctcattaagctgaagaattatccagcaagtgtcaaagagttagtggagctgtcaatggtacagaaacttctttgcaaaatttatgccatgcctttgatataccactagtcccagggcaagttcccagaaatataagctacatatatgtgtgtgtgcgtgtgtgtgtgtatgtgtatgttatatatatatgaatgatatgtatacgtatatacataagatatatgtatatatttgtatgtacaaatatatttacacatatatgtatataaacatggtatactgtatatatgttacatataactgtatgtacatatataaaatatataggtacagacacatactgtatatgatttatttcactcaacatatatgtttatacacatacatgaatataaacatggtgtgtatatatgtatatataacatatatacatatatacacacgatgtatatacttgttgacttcaatctaatatgtttgatgctgtgataaatacagatagtgccctgtggaagcacagatgagtgacagctccagagtcagaaaacattctctacaggagctggaaaacaagctcagtttcaatggaaaggctaagaatggaggcgctgatagggcgttggattacagagaacttgaagaggagggcaaacattacatggaatgaagaagggaatagaccagggtacatatatgggcaatttaccagtgatttgtcctcataaagtagtgagcaaggtgaaggtgggaaagtgagtagaggccaggtcacagaatcttgggaatttcctgtggatgataggatgcccctatagggttttcaagcaggagaaagacttgaccagagttttatttgaggagaacactcagatggcattgtggaagatggattgcatagaggaagctataaaagaagctataaaccgggttggagatggtcccatttgtgaaagttactgatgttgggacctgttctagaattttggaagttggggggatgaacaaaaacacgtacatttgaggaatgtttgagatggaagtcccagaaattactttaaatcaaatctaaaatttaccacatttatctgacatgacacacattaaaatgatttgtttcacaccaaaattattgctgctatcattccggttgttagagtttcccattccaagacgttgactttcaccaccacctcgccatgcatacctgtgcacatagaatgcaaatactcacatccctacacacaggcgcgcgcgcgcgcgcgcacacacacacacacacacacgcacactggctgtatgccattataatgccttgcttaaagagtacagagtcactcctaattatatcacaaatgaagtcaagaaattcaattttgtgctcaggcctagctctctcattaaggttactgcaatttgggaagttaaaaaaatgttggaatggagatgaatgaggaacaaagtcattggggagctgacttatcctcaattcttcatttcgctttgaaagtaaatacatcggccttgggctctaggctacaaagaaaataatgggcaattattcggttgatctgatcacgatagactgtgaaaccagataatgcctcctgcactcctcattacaccctcccctccaagagcacgttgttttgtctacacagaaatttccaaatatagctcaggtatgttgtttcaggacctcagcagtgactgcagcttgaggtccgtcttttagtccagttttgcagagtgcagtgtctcagtaaattacaaaataaatgccttctgttacatggggaccgctgaacaccagagggagttaagggtttccttcgacagcggtgatgcatgtttcgtttttaaaaggttcccatgaaatactgaaatggagaaacaaataaatttattctttaattcataaagtatattgggaagaaagatagctgttgattggtaaaaaactctactgtatttttgtttaaactgaagaatgtggttgatgtaaaaacaacttctcctcacttttttttccagttttcttctttatgttgacaatttcccgctattttgaaggacattactaacgtgtaaaagtcccttctttcttactgcaagtaagcctgttttcaaatttaggcagaaggaaaaaattcctttttctttctttaatttaagcagactgtgcctgagtgcatttttttaaaaggctgcagaggtaaaactaggccacagaagtgatattagctccaggaaaaatagtctgatttacacttgaatgcagttatttcaacttttcaagtaatgtaatcttacagagatctccattccaaaaatatgacaatgtacaaagtagaaaaatcaaacttcacaggatcattttatttccattaaattccactctgaatattgcagaaggtaatatttagttttattattattaattccaaatataacaaatagtggtctccatctgggttgatttattatcatttaaaatagtagaacattttaagctttcactttatagaagatagcataggatatgttccaaactactgtttcttcaattccccttttgctaaaagtagaatggtctagattcttagaaagcatgtattatagacaggactatttttgagaaaacaacagtaattggacttgtaattattaaaagatttatacatgaatgccttgagaaaacaataataacacatgaagagttattagagaatattatcactatatcctatgcatgtgtatcatgttatatcttattagtaatattggactttccttttctagcttataaattgcctgtgattaggcatttttccagcttgataaagcatctttcaaccaaatgtgaaaaagcattatcaaaaataaattttagaaatactttgggtctatcctattcagtataatatcatgctgttactaatgtaatcttttaaatttcttacaataatccagtgattattatttctaatatacttaggaaagtgtaatgaagtatctgaactctattatcaccaagaagttgattcttcatgagaggcagcagagtgtagggttaggggaatagattgtggagatcaaaggtctgggttcaaatcctagcactttcactgattgtttctttgcttttgggcaaacttttaacctgtctatgtcccattatttgtaccaaattacttggcttcatttttgccaatcataggaagagggtcacaatagaatggggttatagaactaagaattttggggttcatggtggaaaatatttttactcatgtctgccatataatgctataaaggtttgctatgattatatttgtatattgactaattttgcatcactttgggtattttgtaaggtgagtaaatatgtgagagacagagagctgaactagtggtccttattatgtgaagaaatattgaaaatgaaaagatcaatactagcctcattttaattagactcttaactagaatgatatggacttgggaatgagaaataaacacggaactaaaaaaccacaaagaaggtagtggaccctcattacatatactgaatgaatcaaggcaaatgagtaaagtcccttggtagttaaaaaaaaagtcctgaagcaaaggacacctttttatcgtttttaaatacttcacttgtaatctttgatatcagatcagtcacattatcattcatcagattttaaatccctgcactagtcctctcaacacccatctaaaattattagaatttatattcaacacaacatgtttgcattcagattcagcatcctttcagcacttgcagaaaagtagcaatgaaaatataacgtaaccttaaatgaaatatatcaccattcttgctcaggcagacaaaaagactctgtggaaacagtgcctctaaagaactttagcattttagatgtagtaatttctattctaataagagtatattatagcagtgagtaagaatattaatgcaccttattctggagagggaaaaaaaggagctcttttccgatgtcatcgccttgagggctaataagcatgccatttgatccacttaattgtcttcactctgctctatgaattgcctacaagattctttatctttcctggacatgagtaatgtgaacatacatcaatgctaggagtttgaccttctccactgagcttcccttaagaggatcgtctaccatggggaaaagtaaaagatagtggaaacgttttttaaaaaatgaattaggttggagagaaaatccatctatttcatcactaaacctcagataaatagatgaccccgttagcagtgcccttggagccctactgttatacaaattgatcgacaaatgttctcccaatagagaactgtgacctatttatctcagaagagccaaagaccgagttaaatctcttaaaatatcacacccttggtgcttcagccattttcctttgttgctctttaatttgagacatttgtcaaggaaagaaaatatatgtcttctgggagttcccttgtggagttacgaaggatgcaaatctggcccgagatatcatgagccttccaagaaagtcaaaactcacactcttgcttttctcatttattgcccagcttttcagctagagctggaatatgctcactgactccttctgacagtgtttttctaatggatatgagaagcattaggaccacaggctttagacccccacaggagcactgctaaaaccaaaagactaatttttaatccctcaaattaagaaaatagaaaagaaaacaccaaagatcaagggcacatcatgagtaagaaagcagctgacaagtcttgtggtttgtcttgctttcttgtccagaagaatgagattgttagttgagtttttctcattcactttacattgtttggagcaagccaattctatcccagaatctcaatttcctcctctgttatatgaaaggatcagggtgtgtaatctctaaggcctcttttgagtctatgatttttactactaatttagttaggaaaatttaggccctaaaatatagcaaatggatatatcaaaagaatgaaaaccagtaaaaaaaaaaatataaatttcttaatgacttccaagaaaacaaacaccagccagttcaagatgccaaaagtgcattgtgttttcagtaatacatttaaattaaatttgttcatcccaaaacttttgacccaaagaaatctcgtgtctaaaggctagagctctgggcctatttccttctttgacagagtagaaacccttgactttacatctcagagctcccaaattacaaatgatatcaagagatgaagaataattgcaaaaaagcaaggggaggggtataggattttcaaggcataagtgttcacacacaaacacatgcttgattcaaagaatacagtcatatgttgactaacaacagagaaacgttatgagaaacatgttgttaggcaattttgttattgtgtgaacatcagagtttacataaacctacatggtgcagcctactacacacctaggctatatggtacagcttatggctcctaggctacaaatctgtacagcatgttactctactgaatgctacaggtaattgtaacacgatgataaatatttgtatatctaaacatagaacaggtacagtaaaaatatggtataaaagataaaaaaaaaagtacacttgtataaggcatttgtcatgaatggagcttgcagggctggaggttgccctgggtgagttggtgagtgaatggtaagtgaatttgaaggcctagggcatttctgtgcactactgtagactttgtaaatgccatacactgtaggctatactaaatttatataaaaacttttcttcaataataaattaactttagcttgctataacttttttgctttataaacttgtacttttttaaaaagctttttgacccttttataaacccttagtttaaaacacaaatatactgcacagtgatcaaaaatattttctttctttatatccttattctataagctttttttaatatttaattttttaactttttaaactaaaaactaacacacaaatctacatatcaacctagtcctacacagggtcaggaccatcactatcttctacctctggatcttgtcccactagaaggtcttcaggggcaacagcacacaaggagctgtcatctatgataacaatgccttcttctggaatacatccagaagaacctacctgaggctattttacagttaatattatttgtttataattagaaggagtatatcttaaaataacaataaaaagtatagtatagtaaatacataaatcaataacatagttgctatggtttggctctgtcccctgccacaaatctcaacttgaattgcaatttccataatccccacgtgtcatggaaggggccgggtgaaaggtaattgaatcatgggggcaggtctttcccatgctgttctcatgatagtgaataagtctcatgagatctgatggttttataaaggggagtttccctggacaggtgctcttgcctgccaccatgtaagatgtgacttcgctcctctttgccttccgccatgattgtgaggcccccccagccatgtggaactgagtccattaaacctctttcctatataaattagccagtctcccatatgtctttattagcagtgtgagaacagactaatataatagtcatttattatcattatcaagtatgatgtattacatataactgtatgtgctatacttctgcacgactggcagcacagtgggtctgtttacaccagcatcactacaaatacatgaacaatgcattgccactaggaccttaggatggctacaatgtcactaggcaaaagggattttttggtttacttatcttatggaaacactgtcatatatacagtctgtgattggccacaataccattatacggtatatgactataattattaaaatgctactagtgaaagcacaacattaaaaacattttgttctttcccttaaagggactctggtgtgggtgctatgatatataaaagtaaattcaatatttggcattatgtcaccagagcagataaagtggtgtaaaaaaggagggaaagccatttcccacaggagagtcaaggaaggctttgtggaggatgtgtcatttgagatgggccataaaacacaggtagtatttatattttaaagacatttggggtggaggaaactgaatccatccatttattcacttctgcattcatttactcatttacccaacatctattaaccaatgacaatccacaaggtattgtgttgaatcccagactatgaggtcaaataaaacaaagtctttgctttcagggcatactacttatttgaaaaatagctaagagatcagatcatctaggtcataaaatacacataaaagagtagaggatataaaacagggaagtggattaggatctaagtgtggaaggccttgaatctcagcttgatccttttttgataggcaatgagatggtcacggaggtatccggccagcctgcaggtacaacttaatcaacaatgtgccttaagtgaaagtcaccaagtagccttaagtagcactgaccggcggaagtaaattaggtagacctcaaaaagcaaaaagaaaaactagcaaacacacacaggttagtagtcatttagtatctctatttccacaccctgactcaaataactcccttgattctcagaaccaatatttcttctgaaatggctctcctgaagggtttaatttaatacaattgtccgacattctaatttactctctatgggtgaagaggatggtatttacaggaattgctttcaaatagacaaagtcaactctgatacttgctctaggaggaaaccactgttttaaaataccagatttgtggtgtggacctaaatattaaatgctattctttttttttttttaatcaagtgacctgtcttcgtcattattctttcttcaagtcatagactcttcttttccttttaatgatgtatggctcattgaaattattgttaaaactgtatttagcacaattgtaaattaatacaaatgtctgcaatctcagggagaccagaagaactggaggaaatggggccagtgagacccagaaggtagagggactcgttcaacgtcatgaagtgagtcagaggggagtcaggaactaactcctagagggactcgttcaacgtcatgaagtgagtcagaggggagtcaggaactaactccgtgagtcatggctcccagtctgtgctctgaccgcgagacaaagctcctccctggccacagtaagaggactcacccttgacgcagccaagctggctctttctctacatctctggcctccactaatggcagtactatgtcctgttacattttgttccacggtccagaatacgttccaatgaacacattttggctaggtggagaagtggtagcaatgaagtagttcaccttataatacaaagccactgaagcccagtgcaggtaagagggccagagtcggaaatggagtgagcagattccaccaagtctgaaatgagaaactttcagtttacacagttgaggcattcagcaagtcagaaaaagataggaaaagaagccaggggtagagcaagatgttgggagtgtctttttccgctcctaaatcagtaacacacttctgctctgggatagcatattaagatgaggaatgaatacattagaataagatgggctgaaaagtctgttgatattcctgtggatattatctattatttgtttgttagaatatctatgcttattaccacttctccatatccgacattctaatttactttctatggtgaagaggatggcatttacgggaattgctttcaaatggacaaagtcaactctgatacttgctctgggaggaaaccactgttttataataccagatttatggtatggacctaaatattaaatgctattcttttttttttattaagtgacctgtcttagtcattattctttcttcaagtcatagagtcttcttttccttttaatgatgtatggctcattgaaattattgttaaaactgtattttagcacagctttacatatacaatattaaaaacatgccttggtcattaatgctgtggaaatataaatactccttgtgtagatctgtggccatttcttacagttccaaggtaaaggtacatttacaagcgtctgggagaaatgagtaataatacctttttcatatgaaaatatcaatgtgggaaagccagtgtactcaataattctttatagtggaggtggttctcgtactcataggagcaaaatattgcattaaaaatttaaaattttatttaagtaaagtctatgcacactcaaaaattcaaagtcaaaaccacaaaaagctaacctatatcattgagggatgcatacgtaagtgataaaaatataaataaatgcaaaaattattattacagaagtcatattaatatcagctttaaaggttaggaggaggttttgctcagagagagtagatggtttaggggttgagggtgctttcaggggctggcaatgttctactttttgacctgggtggtggttgcacagacatttattatattgttaaactgtccaaatgtgttttatgcagctttctgtgtgtatgttataattcacaataaaaagtttttaaaagttgaatagtactaaaagattataatgaaaaacagctgtttcttgccccgcttgtcctcacctttaattcctactcaacagatgcagccactttagctgtttctaatggtattgatctttatatttctaaagaaaatgcttctatgtctatcttttttttaactttatgcattatatttccactttcttctagagctgacaaagaattaactctggcacgcattcctcaacaggcatgtctcttctctccttccctcctgttcccaagattgttggttaaatgaatagtcaatacccacctttttatgactaggcataatttgctgatagccgagctacccagtactttaagattacactttgttctgttttgcctttttttttttttttttttgagacagagtcttgttctgtcacccaggctggagtgtagtggcatgaacatgtctcactgcagcctcaatcccctgggcccaactgatcctccaacctcaacctcctgagtagctgagaccacagatacacaccaccacacccagctaatttttaaatgatctgtagatacagaatttccctatgtttcccagattggtcttggactcctgggctcaagcgatcctcctgcttcaacctcccaaagggctgggattacaagcgtgagatgtctcatcctgttttgcacatgtttatactctcctgacgatagttgtccatgttttgtttttctttgtattttgttctatgtaactctcacttattcagcttcaacgattttcagagaagaactataaatattctctcagaatattccaatataatctctcatcttggggttcgtgtgtgtgtgtgtgtgtgtgtgtgtgtgtattttctcttttcttctgccttaacttgcataggctattaattaggcctgctacaacagccatcttactaagtcttctcttcaccatcattctgggagctctcttcacatcttccatattgcataaattcctacatattccttctttataaattaatgccttggagtgtgacaccagaagcttcctagaaaaagaagcgtggctggtcatttttttgagagttgacaggtctgaaaatatctcaattttactattacactcctatggtttggctatgattataagttttgaattttatttttagaattttgaagatatatttgtgctgtattctagcttccagtaatctcactcataattcctttttgatgtgacttatgttttctttaaaagcttgtagggttttttttcttaattctttgtgtcctggaattttattataaggcaactggatgtgggtctgttttctttaaattagtctgctgtatacaaggtgatgtcatttaatctagaaactcattgtcttcaattctgtgttatttctcttctcttatttgtcccttattcttgaactcttcttagaggttgaaccatctttgtcagtctttcacttttcttctctttgtcttttttatcttctaattatttagtgcacttttaattattctattcaactttaaatttcccctttccatttccctctcaactcttctctacatagcagtatgaagtgcttttatagcagactgacttagtgaccaactcttggtatgtgatacatctgcacatcttccttaggatagaaataaaacccctcggcatgctgttacgatttggcttttgcttatctctgtagttcactagattaccactgcccagaataagcaatgcactattaaatatctcccagttctttgattgtgctattcactccttcatattgtttgctagtcttctttgccttgatatttttatttctttcctttatctgactaccacttattaatttaaactcagctgcatattcttcttaaaagaataatcttctaacacacttctccaaggcaacacaaccatctcagatgcattcggtgtttctgttgagtgcttcatagcatgatactctcctctatacaaaggtttatcacacagtattataactgtttgctgatcttccttgtgagatctattgtgcactctacttgagaaggaactatgtctgtcttgtttacacttggtggcccatcactaaccaagttcatggattatagtctagactcagtatttgttgaatggataaaggaataataatctttgcatgtattcagttctttcagtctccaatgcactgttttcactgctctccatctattcacccatatagccatcacaaatccctgaagagattacttctatcattattcctttcccaaaaataagaaaattaaagttgattggaatacccagttccatttgtaagtgacaaagttattgatttgaacccagatattctggttccacaacctccatttgtaactctccagaatgaatacatggatgagcctaggcaataaaacactgaatttaatcttttataaaagagaaataattttcaaatggttttcatagaaatggaattgtataaaaaagggagctgacatttgtgtattttggtaaaatgtatctaaaatccttttattaatccttccagatataaaaactttctacaagcttcaatatttctaacctttaacaaagaacttccaaaatattacaaaaaactagctaagtgaaaacattttccttctttttaaatatcaaacttgttttgtctttctgaaatagttaatgtgaatatatattttaaaactatttaaaattacctttagaaatatccaaatttcaattcttgaacatgctagtgcatagcccaaatggaagatttgggtttagacagtttaaggagctaaatatgaggggttttattactgaatacagggtggtcagctgcaatgtgtaggtagagtaaaataaagaattattgtatcttttctcataaacaagttttgtttttgttttttaaaaacaacccttctcctttctcataattgaactagcaaacggcagttcgatcatgccaatgaaatacctttaggatttttttcaaaacaagttttatttatgtatcagaagatttatttaagaaaaactgccttcatccattccattcctggacaagggccacgtcatggttgggaaacctgtgccatccatagggtcttgcacttagaagggccccgggatttatttaatgttctgctcttgccaccttgaaatttacattatgtttttaaaaggcctatattttcatttttcatttggccccataacacttcttggaggttgaaccatcttggtcagtctttcacttttcctttctcattttcttctctttgtcttttttaatcttctaattatttagtgaatttttaattattctattaaactttaaattacccctttccatttctctctcatctcttctctacgtggcagtactgaagtgcttttgtagcagactgacttagtgaccacctcttggtgtgtgatacatctgcacatcttccttagcataggctaggatatccttctgtggcagatacttctctacattagaagaagttgttgttgggtagtcaaagcagagagatgggaaactgaaatcactgggtttaaacaccagctacaataaaacttcaaacccttaataatgtactaagcttgttctcatcatctatttcaccttatggcggctctacttgccatttatctaatttatagccacatcatcaactcaactaaaacatttcagtagtattttcatttatcttgttttctgtaatttttcctgtcttaatttgttcttcaaactactcccagttatctataagacttttttttacaaaaataatgcctacctttctgcatctgtgcccattctattctctatctagaacgctcttttctgatgcatctgaaggttaaaattcttgtacattataccaggtaggaatggttcagttacaaattgcagaaaatcaacccaacctagattaagaggaaagagagaaattcttattttgaatatttaaaagtccatagatagttcctggtttcaggtatggctgaattcaggattcgggagatgtcactggcacccagcatctcagcactgaatgatattctttctactgtgttggcttcattctcaagctccacttatgagtcctgcagttccaagcttatgtcactaaaacatcgaatataaatggccatagatcgcgcttctttagcagtgataatgtgtcttatatttactgggtttttaatttactgaccttgagattgattcagcaattgggttttctgacagattttacctagtgtcatgtattccaccctgttcctagagtgggattacttctactgaaaacacataaataaaagtcaaaggagatgaattcctacttcacttgcatggcgttattattagaggaagaggaagttgacagtgaaatgatcctcactttcacagatattcaagttgctaagatattgaaaccttccagactggttgacaaagagccccttctccaagttccctgaaaactccttgcctggccaagccagtctggtcatgcccataggaccaccccaacctctctaaaatctatcaactaaagggttaatgctggaacagtgggaggtttctaagcctgtcgggactccaagttcagtgttctttcagctttgctagtaactgggttttaccagtggctttatattattatatgacatctgagagaagaaatttcatttttgggataactggagattttagtaataataaatattactaccttctattttagcgataagcagatagcaattttagtggtaacagcaaatgtcagaaaacccaattaccagtggcctaaacacagaggtttatttcttgctctcacagaagtaaagcctgaggctggtttggcagcttctcaattattcgagaccctagaattttccattgtgttgctctgccatttttcataatggactaatacctcgtagtccaggatggctccttaagccccagctacaactttgtattccaggcagcatgacgctgaaaaagtgggcagaagggcatgcccctacaccttaatggtgtgccctagaagtctcacacacaattttccttatattccattggccagaacttaatcactgcacctagtttccagggagaatgtaactatagctactacttaagggggccatgtgtctagtcaaatagtaaggtgttattattgtagaagaaaaaagtcccagatacaggtagacaactaggcttctcagccacagctaatctgttcatagtctttgatttatcatggcaagagaaccttaggaaggaaaagtattcttggagaatcagaatcttagtaaaaaaagttcttattttataccccaaaatggtgatgagggactgcctagaaaccataaatcttattctgaaggaagatggtttcttctaaactctgcctatttttcatcccatccatccaatgtgggtgtttttctttctgcttgatttcaaccacatatggcatgtaaaatgcaagcaggaactgtatatgttcaaaactctttaactcctctgcctaatacttttctctcccatctccaaactttaaaggatttacagtttatataaagcaatacaattaattcattgaacaactatatcttaagcatcttctatatgttggacattcttctagaagctggggcaacatcagtgaaaataacagatacatttaagggtggagcaactaacagtgaataaggaaacgatactgtgtgttatatcttggtcagtgttcagggatacaataaagcaggatacggaagattgtgagtaccgggagtggagacttgcaattttacagtaggtttcttccctgagaagttgatatttaaacaagagaggcaagagaatgaaccacacagaaatctgggagaaaaatatttcaggccagagaggaggaagtgcaaaggtgttaaggaggcgtcatgcccgtgctccaagcagcaaagagttgtatgtctgcttggctctactaaagcgagcaagtgggaaatgacttcagagccaagatcatagatgcttagtaggctgtttaagactgacttttcattatccttagcaaactgacacagaagcataaaaacaaataccacatgttctcacttataagtgggagctaaatgatgagaacacatggacacattgaggagagtgacacacactggggtctttcggagagtggagggtgggaggaaggagaagttcaggtaaaataacaaacggtactaggcttctgtacaacaaaccctcatgacgcaagtttacctatgtaacaaacctgcacttgtacccctgaacttaataaaagtttaaaaaccaaaccaaaacaaaacaaaagcaaaacaaacaaacaaacaaacaaaagactggcttttactctgagtgaagtgtgaaatcattttgagggttttgagacgagaagaggcgtaatctgttttagaaacatcctaccagttgcagtattgagatcagactctaggggagagtaagatgaagcaaggagagaaacttggaggtagagtcgactgaaataatccaagaaaatattatataaatactgtttacagagagtagaaaatgctgacagcatatactgacaaattcgatatggggtgtgagaaagggagggattaagaaagacatgaaggtatttgaaggatgtagttttgatttggctgagatggtgagacggtaggacgctactggagaaatctcagtaattctgttaggtagacatccaaacggaggtctgggattcagtggtgcaccctgggctgaaaatgtaaaaatgtgctcatccttagcatgtaggtgtgatttaacaccatgctactggatgaaatcaccaaggcattgagtgtaagtaggtagaaaaaaaaataaccatgaattctgggacatacccatccaatgtttagaaactgatgatacaggagctaaaaagaaattatttaggcagatatgagggtaggagagtcctcggcggaatttcccttttaacaaaaagcagcccccaaatcatttctttttcttttcttttctttcttttctttttttttttttttttttttgagacagagtcttgctctgtcgcccaggctggagtgcagtgtcctgatctcggctcactgcaacctccgcctcccgggttcaagcaattctcctgcctcagcctcccgagtagctgggactacaggtgcatgcagccacgccccgctaaatttcgtattttagtagagacagggtttcaccatgttgcccaggctggtcgcgaactcctgagctcaggcaatccgctggtcttggtctcccaaagtgctgggattacaggcgtgagccaccgtgccgggccaaatcatttcttttttaacaaacagcatcctgaaaaatcgagctgcaaaaaaagataaggaagccggaagcttgcatgagggaaatgccggcagctgtgccaacagaaaagggctacctggaagccaggtgtgttcaacgtggaggccccttattcccttttctttgttgcttcgtgtacagtaaaggggtaggcaacatgatgccggccaggtagagaacatatctgcataataaaagtttagggtggggtggccagcttcttgaggggctatgcaaatggcacacctggtccgaccaatcttttatgccctatgtaaatcaaacaccgcctcctaaagctcgtccataaaaccttctgcatttcgctgcagaagcagcaactcattttctctgggacccctctctgcacggagagctcttctctttctttcgcctattaaacttacatggccgtgggacaatgaacctcaggtattaccccagagaaacaacatcgcttcattgaggggaatgcaaaaatgtagtaaaggaaattgagaatgagaagccaataaagtaggtaagaaacaaggtagagtgacatcatggaagccaaacaaagcaagtgtttccaggatgaaggcgtgatcaactgggtcaaatgtatggtgacagatcaaataagatgaggactaatcattaatcatggattttagcaacactgagtccctgtggacctttacaggagaagttctggtggagggctgagagcaaaagcctggttgaagtgagtttgaaaagatgtgaaatggtaagaattaaatacaatgaatattttcctggacttttgatatacagggcttttttaggatgcaagaaataacaaaatgtttgatttatgatgagcatgactctaattgaaagaaaaaattgataatatagtagccaaagaaataattgctgagtaatgctcttgcagcacaggttagagggggtagactttagacaggagtgtaactaattcccctccattgtcaagagggtaaagtatttgggtacaaaagtcaacaggttggtgagtggcctggtgaagatgtagtggttgtactttaggtcctacctttaattagtttcttattaatgaattaataatcaattaatattgtgtttatttgtaaatttctccaggccaaaaactgcattatgtattttttgacacttatttagccaagcaacaaataattgtttatgaaactctgaataaataacatgacaaaggggtactgtaccaccgaacttcaggccagaagggttcctgtaaaatcttaagaatggtattcactaaagaaatttttaataaagtagaacttaccagtattaaagaattacttgttaaagtaattgataaaactaaattgttatggaattgataaaactaaagttaccttttgtttcaagttccactctttctggtttaaatgtttttaaaaattttatggtgaaatgtgttttacatgaagaaatgaattgaacatatatgtgcagtaaagtaagccacatcatctaattaaagaaataaaatattacctgcactcgaagaaaaaaaaaatcacccatacctcttctgtgatagcttcacctgtttgaggtgatttctatattgactttgatgataatcagcctctttgaggtaactgctatcctgactttgatgagaatcattttctttttttcctctattgttttatctatttacctttcagaaattgagttcaattttatctgtctttagactttatacaaatggagtcctattctgcacatccttttgtatctttattttgttcagtgtgtgtgtgtatgtgtgtgtatgtgtgggtgtgtatcctaaaaagtttgatgtttggataatctgggtgaaggctatttagaaaagtactaatattgcaacatttctgaaagtctagaatcaataactaaaaataaaaatgaaataaaataatttttaattaagataaattaaaatacaaaatgttttaaaatgtgtactttttaacctaactatgcagtaccaccactgtcatacaatgagtatatacaatatggtctatttctgagttatcacaaatttttgcatttatctacatacctatctgcacacattctgcattgtcttaatcactatagcttcaaaataaggcttaataacaggaacagaaagttaacttgattcttattagagtttttgtctatttataatttgttgcacttttatgtgaattctagaatctacttgtcaaggcctaccaatgggaaaatcattacgatttttattgggatggaattaaacctagagatcagattgaggagttgaaatctttacaatattaaggtttcactccatgaacattgtctgtcatcccatttatttatttatttatttaaatttctcagtagttctatatttttttcttagagatattttacacttttgttagatttgttccttagtacttccaacttttgatgcaattgtaaataatgtgtattttatctctgtttaatttggttttaatgtatcttaaatctatgtcatttaagccataatcatttaaactggttacggtgtttctttcctggcaaagtgaagcttgtatcattgtaaagtgattctctttaacacaaaaagtgttactaatataaaaaaaagttagtctatttctgttattttttgttatttatttacatatttctcccctttattttaaacctttatgtgttcttatactcaaagtatatgccttgaaaacaatatgtaatttgtttatgtttataatctggcctgattatctttgacttttaactgaaacatttagtttatttacctagttgcgattattgttatatttgaatttcaaaatagcaccttattttgtcctttaaacacaatttgtgggcattcttaagaaataggatgagattccactttagggatgcagtacaaagttgtccaggctgtgcactgcctccaggtagcacatctaaatggactaccaagcactttacagatgccttaaattcttgtacttgtcgcataaatttttgggtagatgcaagtaacgtcttatgggagaagaaccttttttaaaatttgaactcagataccacatgggtaaggatttgcatttgcttctgctctgcacctggggacattgtagccccagaaagcttcaagctaaatgcacagcttaaggacccttctccaccttggtatctagaagctggatcgcaaagttctgtgagagtcgacccatggcaacattattgcaggaattttttttttcttttcaataacaaccaccccactcttcctaaggtgatctattccgttccctaggggttgggaaaggggtttagtgctgctccacattgtatagcctgggaggttccatattgatgtgagaaatttccgtatttgacttcctactgggagcagtgggaaggctactgggccttgacatcgaacccagttaatatcctttccctgccccctggtggttgccaaagttagagaccaagtttgccaatgtatgcaatcgccatcaggaaaaaagtggttcctgtgtcctggtgctttgcttagctgtcttggctcctgcttctccattaattttggcagtgtcactccttattatcttatcattgctgttcggttttcaatgacaactaaaatagtttttctgcttcattagttgctttcagggagtgacttggtctcaacaacatagcctattaatactaaaatggaagtccacatttaaatctttaatgtttctactacaacattttacatatggcatagaatagaaataccgttttgttatttttcatatgggaagccaattgcttagtgctgtctattgactaattcctccttctcccagtaattggccaggtcatctttgtcaaatatcatgattccatatataagttggtttgtttcttcactctagttgctccattgctgaaacatatgtgatatagtttggctctgtgtcctcacccagatctcaccttgaattgtagcagtccgcatgggagggacctggtgggaggtagttgaatcatgggggcgggtttttctcccgtgctgttcacatgatagtgcataagtctcaggagatctgatggttttataaaagggcagttctcctacacatgccctcttgcctgctgccatgtaagacatgaatttgttcctcatttgccttccaccatgattgtgaggccccctcccaccctcccagccatgtggagctgtgagtcaattaaaccttttcctttataaattacccagtcttgggtatgtctttattagcagcttgaaaacagactaatacaatatgtcagcacattgccgtgctgtcaagatattaaggagtgactgtgccaaaattcacagggaagatagcactaagataattatcaacaaagcactggaatgcagtgctgatggtatttacctatgttggcaaacttggcctctagctctggcaaccacaagggggcagggaagggtcagaagtcaaattgagaagggtcagaagtcagaattgagtcagaagtcaaagcccaaagcctgctgaaggtaaaaagtcgaatagaacttccaccatcaatatagaactgcaaaaggctatgcgctctgagacaggcacatgtaaaccaaccatttccccaaaccctacttaataagactctagttaacaataatttattgtatcatttcaaacaattagaagagaattctgaatgttctcaacacaaagaaagaataaatgtttaggtgacagatatgctaatcaatcattacatactgtatacatatatcaaaatatcactctgtgactcctaaatatgtacaattattacgtgtcattcaaaaaaattaaagatccgagcaacaacaaaaagtttagtatgacatcaccatggcaacctgtgagcatgaaaaaataacctacctacttcaactgtatcctttacacataaataatgtagtgtaaaaaaaaatttacacttaaataatgtagctttatgataagtttatatgtcttgcatgacaaacacttattccttttcctactgtgttattattgttactcgattctttttttaatgccattgagtcagattgtcacattttatgatgaaacttgttgaaattttgactgaaaatatcttgtatatatccgggggaacttgaaatctttacaatattaagttttcctcactctctttttagttagcttttttcaataaagatttataatttaatattaaaggtcttctgcatcttttgattgaataattataggtttttaggtaaatagggtaagtttttcataactctctcattctttgtttctagtggctagaaatgcaattgggttttgcacatgaatcttaaatcttgcaaacctgctaagctcaattactcctagtgaattttctcatctatatttttggacatatgtgtgtgaaagatagttctgtagtgttttctaatttgtataccttgcatatttccaacttgtcttacttgtactgtactaaaaatgttaaacaaatgtggttgtgatggacttcctttctctacctgatttcaaagagaataatttgcattttaccactaaatttctttgctattactcttgatgtgttttagtaattctgtatgtctatccctacccttaatcattttagggcatcaggtaatggaagagtaattttagaacatccctttctcacataggaattatgtgtttgattttcattgtaaagggtctaaatagtaatattgatatgcagtaagaggaacttttagaaacaaacatgtaattacaggctcatgtatatgttgctgaatattatcaatgtacaatcagactttattttctattttagagagagttttatacccaacatttaaatattttatacatgtcatttttagttatcaagcagtatactgtctttggcccaagcaagtgtataattatatgaaatttcatctctccatttttttctcaatatgattactctccattctgtagttatgtgtaaaggatacagttgaagtaggtaggttttttttcatgctcactggttaccatggtgatatcatactacttaactttttttggatgctcggatctttaatttttttaattgacacataataattgcacacatgtaggaggtacagagtgatattttgatatatgtatacaatgtgtaatgattgattagcatatctatcacctaaaacatttatcctttatgttgagaacattcagaattctcttctagctgtttgaaatgataccataaattattgttaactagagtcattccacagcgctatagaaaactagaatttatttctcctgtctagctgtaattttgtatctgttaagcatcctttctctattcccctgcccccacaacaccccaacacctctcttttctccagcctctaataatcacaattctacttttatgaacataacttttttttaagctaccatgtatgagtgagaacattcagtatttgtctttctctgcctgacttatttcatttaacataatgttctccaagctcatccatgtttccatgaatgagaggatttcattatttgatggctgactagtattccattatgtatatacacattttctttatccatttgtctattgatagacatttaggttggttctatgtcttggctattgtgaacagtgctgtgatgaaaatggggtgcagataactcttcaacatactgattttaagcaataggttttaaacatataattttaaatattttatagcattttagaaattttgtcctgggctattttaaatcttaatgcttattaactctttaacctttttgttgtctcgactccaacaaaattttcatttcaggaactcttgtgttttagtcaagtctaattaatatttggagttctaaaaaagctacaactatatgccagttataacaatatgttatttttccttcttagctaagtggggaaagctagtgacagagctatggcaagaaatgttttctgtacactgaacgaaaataaatgaaataaagtatgattctttcagccaaaaaattagccaggcagcttctgaatacttcagccatggagtcaaacatgatttctttaaaggaagttaaaatatgataccagttatatcagcctgaaaacaaaatctgataaaacattgtcatattcatactgtctgaatcctcatccgaaagaagtcacagaagttcccaagtctctactagggattctatagaaaaaggctgaacattcatagacatttaagacttttgtatgaaattaaacttgccactgctttcagacaacatttcatagaaaattgtgctccatagttaaaattttaaattaaaatttctcaatttaaattgaaaaatttaatcttaatgatcaaatcaagtccttgattaagctgtcattgcaataaaagggaattttcttccccacatatgtgcacctatctaagacttactttcttggcctttttttaccttgttccttttcgtcagaatataaactgacactattttgagatttttctgtttatgtttttcttattttcatagaatactcagctagttgtggaggagagtgaagataacgtatgaaagatctcatcgctaggatatcattcaaatgagactttcaaacatcctgaaagtttacatttctgagcccattcccttattcttgatcaatatttctttttttatgatttgtgacatgaacagcatctgtatgaatgtcgctgtttgcagaaacttacatatatttcattaaataaattatatgttacatatacaatggaatattttgtcttcacgtaaatatttctgcatagatgttcgcatggaaataaaacgagaagaaaatgaattctaaacttggctcattgcctaatttattttattactaccttattttattttatatgcagacccaagtttgttttcttggcaaagataaagaaaccggacaagtagttcccttctgcggaaatctggtttcacttgtgtgataccacccagattccctccacctcttccttgccgccattgctctatccacttaaagtgagctaaaatatttaatgggttacgagagtaagaactctgtttttttaaatttcatttaaaatagtggtgtagtatcggttatgatcaacagagtctaaggctcctttgtaaccactaaatctaagaaaagccacaaattaccattggaattgaagagcagttggctttggggactggtttcaatgaccccctccccctaaattaaaatatcctgcatctgtgtaaataaacatctctaggtatatggtaaggcaatatttagcacaaatatgtttcatacaaaattagcagcaaagaaaaactttaaacttgtaattacatgaaaaaaattaagccgttagtgtaattaagatgttccttctttttcccttaaacatggagagcagaagcaatcactctttttttgcatgactactctcattgttgaactttccaaagcattattattattttctctttcttccatgacaatttataatgatacttttattctggcaagaaattaagttctagcactaaatgtttattggctaaattaatgtttataaatgctaaatatagagtagtatttctgccaatgagatctaggaagtcaacagataagcttcttaagagatagtagctaaaagtcttataatctcttctatttatagaagtcaaggaagtgaactcagatgagataaaaactgagttatttagccctagagagtctgtctctagttgtcaccctcatttccccgtcttgatcattctttctctttccagtttccgaagtcaaaactgccttttgaaagtgacacaaaattctagcatgatggttctgttagtgaggcagtaactcataaaagtgtgttttcaaggaaagtgctcatggaggtattctacactgccatctttcttctgaattcttggaaataattatatcttaatgtccttaatgttctgaaggtaatgaacaagtagcttcaatttaactggattttggacacttctccctagagaattcaggaacccactgcctacagttttttactgctattcatggaagaaatgggaggacatgttatcaatctgtattgctaggagactttcaagttatagtgctggagaaatgtatgaaaagcttcccagatgatagggaaaccaatgatactctagtgttctcacctaaatatacagcttttcttcttggaccaccagtatggtgaaagtcttcaatggctccttttttgttgttctagaaataactatttcattttaatttcttctatttgttttataaattatttttcaattgtcaaaaattctatatatttatggtatataatatgatgctttttaaaacatttattttagattcaggggtacatgtgcaggtttcttatttaggtaaattgcctggtgcagggttttggggtacagattattgtgtcacccaggtaataagcatagtacaggatatgtactttttcaatcctcaccctcctcccaccctccaccctcaagtaggccctggtggccattgttcccttctttgtgcccacttctattcaaagtttaattctcacttataagtgagaacattcagtatttggttgtccattcctatgttagtttgcttaggataatgacctccagctttacccatgttcctgcagaggacattatcttgttattttttatggctgcatagtattccatggtgtatatgtaccatagttttttaatgcaatctaccgttgatggacatttaagttgactccacgtctttgctattgtgaatagtgctgtgataagcatacgtgcgcatgtacctttaaggtagaatgatatacatccctttgggtacatatccaataatgggattgctaggtagcatggtaatcctgttttagttctttgagaaattgccaagctgttttccacaatggctgaagtaatttccattcccacctgcagtgtataagcattccattttctccacaagctcatcagcctgtgttatttttttgactttttaataatagccattctgacaggtgtgagatggtttctcattgtggtttcaatttgcttttctctaatgacaagcaatattgggagtttttttatatatgcgttggccatgtgtgtcttctttggaaaagtgtctgttcatgtcctttgcctactgttcaatggggttttgtttttttgcttgtaaatttgtttaagttccttacagattctggatattagagctttgttgccatcagttgaatcgcaaccgattgcagccaccctaggctatggtggtcatctgctccaaccgccttatttacaggtgaaaaaaaaaatgagtccccagatgtaaaagttgagggggagtcagagttggtggcaaaaccagaactaagactcaattctcttgatgcatagaccatttttttcttccacatttgttaaatgtgtttggccaatactccctagtgtttttcacattgccctacgtgtatttcaagatccatcaaaaccttgctccgtcttgccatttaactctattttctattcatctcataatatgaaaatcttgtgaccatcaagctgagcttcttcattctctttaccaatgcacctactgaactttttaccttgtgctacggtgaccaaacatcccaattttccaaggactgtctgggttttagcactgaaagtcctgcactctggggacctcctctgtactaagcaaattggcctagttggttaccctaccatgcccactacttgcatagctattgccttgatcctcttctctagaattttcttcccctcatcttttcttccccaaattttcttccttaaatttttatgatgacgaaagaaaattcaaacgcccttccctttggataatcttcaattgttattctctaaacttctatgggtctgttattataccttacatatttaagcttttcattaaaggctgtcttgacttgcttgagaagtacttgagacattatcttccctgcacaaagtagatggtaatctactatcaaatagagtcatggagataaaaagcagcttgtttccgtaaggtcaattttgtgagacaggcattgcactcatttaataaatactatacactgtgagataagtattattacacctattttatggaaacaaatgaagtttagagaaggtagcaagttgatcataaggattcaaatctagccctctctgactccttccaatacatcacacttgctggataggaaatgtgttgatgttttggaaattcccacaactctaacctagtgctaagcccaaagtgcgtgctcaaaaaatacttgctgttatgttctaaattgcacttccaattagatctacaaacacatgttcatgatggcagggaagatacattatttccaaaaagaataataaatcataaaaagtattttatccaatgtaagcataattgtaattgtattttatagcttaacgttgtaatattgatgagtgtgttctctttgtcttcttattcttctagccttaaaaatagtcacaaatgtcatatatccatatattgagacacacacacacacacacacacacacacacacatatatatacacatacatacagtcttgctatcatcgctaaaatttttgtcatcatctaactcatttttggctttttttttctggctttcatacttttccttatctcatctgttagattgccactgctgaatacagtagccactagtcaagtatggtttctgagcactcaaaatgtgacagactcacagtgagacatcctgcaagtatgagatacacagctgactttgaagatgtaattccaaaaaaaatgtaaaatagctgatcagtgatttttatgttgactacatttttaaaagataatctttttatatattgggttaaataacacattattaaaattaacattgcttgttccttttttacttttgaaaaatatttggctctaagaacatttaaagttacacatatgggctacattatatatttattggacagcactactattactactaaatactttctagagacatcctgtgatgaatactttttattcattttcctttgagaaaatatcatattttaatgtaattttatggaattttttcaaataaagttatctttaaatattatgtatttggtgattaaattaataaatgtcaacatatctccctacaagtgatcagcaaatgagatttttttcctgataaaataattcatggtaaaaggaaagttatgtaggccatatgaacatatatgtgacggtgaaattctggcatagtgtatgtggcatgaatcatgatattcaaagaatgacatatgaacattctcttaatttggatttctatatatttaccatggaactaaactttaaccaaattgatagcatagaaaaataaaacagtgaaaataaaacaaccgtaattactaggaagatgaaaaaagttttatgaaaaaatattgcatagttcaactatttcttaaaacctatttaaatctggaatttggactattcagacctgggaaagttataagataaggcctgtaaaatacaccctcatcaaaggatggcaataagttgctttgtgaaagctcttataggaaacaaaatgctccaccctctcacagctaatgtgaggatttagaaattatgagcaaatgtattaattatttctaaatgacattgctttccacagtctcatttccaacaagctgatacaaagaccacaggaaaggaagaaaggagaactacaaaccactgctcaaggaaataggagaggacacaaacaaatggaaaaaaaaaacattccatgctcttgggtaggaagaatcaatatcgtgaaaatgtccatactgcccaaagtaatttatagattcagtgcaatccccatcaagctaccactaactttcttcacagaattagaaaaaactactttaaatttcatatggaaccaataaagagcccgtatagccaagacaatcctaagcaaaaagaacaaagctggaggcatcacgttacgtgacttcaaactacactacaaggctacagtaaccaaaacagcatggtactggaaccaaaacagcatggtaccggtaccaaaacagatatatagaccaatggaacagaacagaggccttagaaataacaccacccatctacagccatctgatctttgacaaacccgacaaaaacaagcaatggggaaaggattccctatttaataaatggtgttgggaaaacgggctagccatatgcagaaaactggaactggaccccttccttacaccttatacaaaaattaacttaagatggattaaaggcttaaacatgagacctaaaaccataaaaaccctagaagaaaacctaggcaataccattcaagacataggcatgggcaaagacttcatgactaaaacaccaaaagcaatggtaacagaagccagaattgacaaatgggatctaattaaactaaagagctcctgcacagtaaaataaactatcagcagagtgaacaggcaacctatagaatgggagaaaatttttgcaatctatccatctgacaaatggctaatatacagaatctacaaataatttaaacaaatttacaagaaaaaagcaaacaaacccatcaaaaagtgggcaaaggagatgaacagacacttctcaaaagaagacatttatgtggccaacaaacatatggaaaaaagtcactgtcactggtcattagagaaatgcaaatcaaaaccacaatgaaatcccatctcacactagttagaagggcgatcattaaaaagtcaggaaacaacagatgctggagaggatgtggagagataggaacacttttacactgttagtgggagtgtaaattagttcaaccattatggaagacagtgtggcgaatcctcaaggatccagaaataccatttgacctagcaatcccattactgggtacgtacctaaagggttacaaatcattctactataaagacacatgcacatgtatgtttattgcagcactgttcataatagcaaagacttggaaccaacccaaatgccgatcattgatagactggataaagaaaatgtggcatatatacaccatgaaatactatgcagccataaaagcagatgagttcatgtcctttgcagggacatggatgaagctggaaaccatcattctcagcaaactaacataggaacagaaaaccaaacacctcataagtgggagttgaacaatgagacacatggagacagggagggggaacatcacgcaccagggcctgtcagtgggtggggggctaggggaggtatagcgttaggagaaatacctaatgtagatgacaggttgatgggtgaagcaaaccaccatggcatgtgtatacctatgtaacaaacctgcacgttctgcacatgtatcccagaacttaaagtataataaaaaaaggaagaaagggaggtttagtgtgtatgtttgtctgtgtatgtgtgtgtgtgtgtgtgtgttttaaggcggatagaaaaattgttctaatcactattgtgattaaattttccaaggacttgtgtctatttacagtaaggacttattccttatgttttgaaatacaatatgttaccttaagcccagtaaatttgtctaggcaaaagtttttgattgtgtgtgaaagtgttcacgatgataacttcaattagatatctccccttgtttattaaaagatgtgcttgaaactaacactttaaggatattgcttttaaactgaagtatctggagcaaaaggaataatttataatacaggaaacttacatgtctagaactctgttattcgaagtgtggtgcaaggacaagcaacatcaacatcactttggagcttgttaggatctcaggccgttcctcatcctgattgaatcagattatatattttaacaagactcctaggaactagtatatacaataaagttgcagaaacactagtctgtggaatctatgatgttgaaaagtatttgttcttttgcatagacagaccaaattattgtacctaggagagttcaggtgccctgggaagcataaagcaagataagattagatatacaagagctttatagtagaagtaagcagatgaatgtagggtgagctttccaatttcaaaacaggtctgacatctgtgggaggagacaagaatggaagaagaattgggcaagaagggtctctaccgcagttcagtttcaaggaagttttggccaagccactgggaagttctcacacaaaagtcgccctctgtagagccctactattggtaggaatgagtcccttagccccttctgtgtacagtcattggctgaaggcagcccacagcaacatcacctccatgcaaacacagggttggatcaagatagttgtcaatagataatgttccctgtcacaagagcttcaagtcatgcactcctacagtcaccacataaggcaaagcaaaatttagtaaacctagcagtggaggaaaaagagaagagaattttaagcattaaaactgaatagaggatcggcatggtgcctcacacctgtaatcccggcactttgggaggccgtggcaggagaattgcttaagcccaggagtttgagactagcttgggcaacatagtgagaccctgtctctaccaaaaattaaaacacaattagctgggcatggtggctcctgcctgtagttccagctattcaggaggctgaggtgggaggatcggttgagcccaggagtttgaggttgcagtgagccaaggttgtgccactgcattccagcctgggcaatagagtgaggcatttttacattgagttcactcctggtgttgtacattctatggattttgacaaatgcatgatgacatttacatactattgtagataggttgttatctacaatctagatctcagtagtcttaccagtagagtagcatttggcattattaggcaatctgtttctaaaaaacaaaaaaacaaaaaggagaagaagaaaaagaaataaaaactgaatagaataggaggtgaatggataaactatgatacatccagacaattgaggtattattcagtaccaaaaagaaatgagcgatcaagctatgaaaaggcatgaaagaaccttaaatgcataattactaagtgatagaagccaatccaaaaaggccacatcctgaatgtttttagctatattacattctggaaaagacaaaatatggtgtcagtaagatcagtggttgccagaggttaatggggagaaaggaatggatgggcagggcacagagaatgtttaaggctgtgaaactattctatgtgacatgacagtggtgtctagattgtagataacaatatatttacaatattaaataaatgtcattatgcatttgtgaaaatccatagaatgtacaacaccaagaatgaatcttaatgtaaactgtggactttcggttgatgatgatgtgtcaatgtaggttcattgattgcaacaaaggtaccactctggggtgtgatattgatagtgggggaggctgtgctgtttaggagcaggggatatatgggaactctctgtactttctgctcaattatgctttgaacctaaaattgccataaaaataaaatctatttgtaaaaaaatgaacagagagagtgatcattcagattattttatttcatctttgtctttgatgggctgaagtcacctagccagaaaaacaaaacttgtagaatcctctttggttactgaatacatgctccatgacagcttggatttccctgctccagagaccccaacaggggctactatctgttttagtagcagaggtggcttagagttcagcagagcagtgcagatagcttccttcttgagaaagtttctcttttttattatataatctgttatttaagagactacaagaaaaaaaaaatacgttccccgattgaaaaaagaaagaaaaacctgagcattacaggtgtagacttgagtcactaaagaaacaatgattattagggttattaaataattcttagaaacttcaaaatgttccttgtcaacagagacccagagtaagtattaagagaagaacacaggtgcacggtccccacagcagccttatcagtagggcggcatttggcaccatctttagggatgtggtcacatcactcaggctctttgatctcagaaccttcatctttgaagagcaaagaagcattcatgtttacttttcacttcctttacacctaaacattactctcagtatactcgagaaatcattaatgatgatagcttccgggggatcaaacactctaagagcatttagaaaataaaagtcatttagaaaataataatgtcatatttatccctttgaagagctggctgatgtagcaactgaggtttacaataggaattaacaacagatttctttgattaaagtgccatgaggggcacttgatatctacacaatttattaggtagttaacttctcttgcagaataataagctgagacacgtattaagcacttacagtgtgacatctacactgcttggtccttcgcatgcacccttttatctaattcttacaatagattgacgataaggtaatattatctccatttaaagaaacccttggacacggatttaagaaattagcctaaggtcgacatttagtaaatagtggaagaaatatgagccagagagaagtactaagtggttcttctatgttggatgtgtaccagaatcatggagaaagtttattaaattgcacatctgtaggccagcatcagggttttttattagggcctggggttgtgtctgaccgtctgatatatttagaagattctggaaggaatctgatataactaagaacatcagaacaactgatgtaagtctgcaatgctgggaggtcaatttctccaccattgtcattctgcaggagtttatctgttcttggatctgatttagtttttggaaagctttagtgaatgatgcgtaagtctccctttttggcaatgcgttcagcagttgcctggtttatatgcttcttcctcttggcagaactcagtattcacgtattgaatattgtttactagcctccttgggtggagagattaattatttatttctacagccttggcttcattgatcctcctgataggactcatgccagagaatgagtgtgaatcttcctgctcagattagaggcttgggctgctttgtaaaaatgatactctacttcagccctccaaatccacacaaaggctttccaacaatttgtatacacctaattccggcccccacttcctcttctagtctggagaaaggataaaattcttaaaccacctggtagggtagggaagattagacaaagggagtataacacagaaatgagggaatagagttggtcacttctggcctctctccagtttccttttctctctgttctttgagatgtagaaacatcatgggtttagattaacgtattcttggcattgtttcctgtttcaaagaaaaagaagggatgtcagtggtatctgatatcaaataatttaaccagaagggtagctaagctaaagcaaagtgagtccaggctcatttttcaacaggctaaaatgaagaaaaggaaagctttagatatcattcattttgatccaaagcatgttgaccaaacacctattaagtactttgaaatgttcctgttataatatgggctgcaaatacatgggtattgaatgactttattagtgaaggcattgtgttgtagacaaatatgaatgaaggctggtatttgcctttaagagtttaattgggcttttgtattgggggtgcaggcaggcacgtgcaaaatatttgggctactagctccagcttaaggcagaacatgatatagtggaggcagagggtactatgaagttacaacaggcagaaaaatgtgttttgatcaagaggtttgataatgaaggaacaggcttttgatgtccaaattgaatttcattaaagcttcagataaatattctcctggaatagtttgagggtcattctgacataggaaatatgaactctgcagtgagaaagagaagctggataggaaagcaggctctcagagaattttcctcagtctattaccaaaggttcaaggctgcaatcttctggcatgtgtcaggaataaaacacacacatacacacacacacacacacacacacacacacacacacacaaactcaaacaagattgcagaagatgtgttctgatttaatctaggtgtcaagtctttgatgccatggattaagtgggtggcttaaattaaaaaaaaaaatttctgtatagttccaaaggctagaagttcaaaaccaaggtggctgcagggagaatctgtaccacatctctttcttagattttgctggttgacatcaatctctggtgttacttggctttataaacacataactccaatctctgcctccatcttcacatggcattcttccctgtgtctcccttcatttcatatggccttcttatgaggataccagccactgatttagggcctagtattacctcatcttaactaattacatcagcaaaggccctatttccaagtaagatcacagttgaggttccatgtggatgtgaattttgggagacaattcaactgtgttagtctgcttgcattgccataaaggaatatctgagattgggtaatttttaaagaaaagaggcttattttggctcatggctctgcagtctgtacatgaagcctgatgcaggcatctgtttctggtgaggcttcaggaagctttcaatcatggtggaaggcaaagggggatccggcatatcacatggcaagaaggagagagctgggtcaggtgccacactcttttacacaactagatctcctatcaactcagagtgagaactcgtacattattatgaggtgggcaccaaggcattcatgagggatctatccccatgacccaatcacctcgcaccaggccctaccttcaacaatggggatgacatttaaacatgagatttgaggggacaaacgttcaaaccatatcactaacccagtcaatggggtcaagtttttgagactgcaatttaaagactataacattactaccaatttaggctaatttccagaattctgtaaaacctgggtagagagaaacaaagaaaatatccatatgttagaattgaaagctgattgaaattaaagagacgaaagcctttacgaagtgcctggggaatcaggaggtctgattcaggagcaaaaatgagcccactacaggaagatgaagaaatctaagtttcataagacttgacataggggaaaaaatggttttcacataggtaatgccatagttatgaaatgaaaatgcctgtcctttctactctcaaacaggttgctgatatagacctatctccaaatcctaatgggtctgaggcttattgatattcctatggtatttttccttattgtgagaaaaggattgagcagtcctcagtttcctggttatttttgttagcactgaagatacaaccatagtcatgcattcctcaatgatggtgatatacatatattctgagaagtgcattgttaggtgatttcatgatcttgcaaacatcatagaatgtacttacacaaatctagatggtacagcctactacacacctaggctacgtggtgtagcctatcactcctaagctacaaacctaagtattagtgtatctaaacatacaaaaggtaaagtaaaaatatggtattataattttatagtaccactgtcacatatgcagtccatcattgaccaagacatcattattcagtgcatgactgtagtataaaaatggaactggctatcaatctgagcgttgaaaagtggagagagttttataaatcgagatgaaggactttccggctgaaagatcagtgtatttccagaatgagaaagtgaatgttgtgttcagccttacaaattttccagcatagcaaaaatgcactcacatggtaagatctaatgggacaggattctgagaacttatgtcagaggcagataatagatgacttggatttaaaggctaagaaagaaatgtgacttttttttttttttttttttttgagacggagtctcgctctgtcgcccaggctggagtgcagtggcgtgatctcggctcactgcaacctccgcctcctcggttcaagccattctcctgcctcagcttcccgagtagctgagactacagacgtgtgccaccacacccagctaatttttgtatttttagtagaggcggggtttcatcatgttggccaggatgatctcgatctcttgaccttgtgatctgcccgccttggcctctcaaagtgctgggattacaggcgtgagccaccgtgccccgccaggaaggattttttaaactctaatagatgtgaggaattagttagactagaacatgtgtgtacacttagcagaagtctgtaagagaaaagttatgtagaaactaataggaggtaatcgaatagagtgtaacttgtagttaacaggaaaaaaagagattatggccaagctaaaggttggttttaaaaaacattaaggtatatgtatatttaaaacaagaaacataaactaaaaaataagaactagaaaagactagttggtttaagaaagaaattctgagatggagaggagatacataaaaatatttcataatggatggatttcattttgtcagtaaattgaaatgagataatcaagggagggaaagatgaaataaatcaagacttctggtgatatgatagcatgtttgaaatatgtgtcactggatcacagctgggaacagccacatgagactcaggagggccagaaggcctagaggaaagagaagttgaatgattagacatttcaatcattgttaagaacacattcagtgggagtaaaaaaagtgggagaggtgaaaagagagtgtgatcaggaacataaaccatttatatcattactcaactctttatttttttatatttttatgttttatgcaaatggaaactggcctttttttttaaatttgcatttaaaaaaactgctgggcatttaaagggttggttccaagtctttgctatcgtgaacagtgctgcaattggggagttgaacaatgagaacacacggacacagggaggggaacatcacacactggggcctgttggggggtgggggactaggggagggatagcattaggagaaatacctaatgtagatgatgggttgatttgttgggtgcagcaaacaaccatggcacgtgtatacctatgtaacaaacctgcacattctgcacatgtaccccagaactaaaagtataacaacaataacaaaaaaattgcacagaactggctactggtcatatcgggaagacaggtatctggccctaggaaagcccaggagatagccaaaacgcatagagaactgacaaagtgtggtaatgctaagtagctagaacaacggtaaggttaactttttctgggagttggatagaaggaatagagacaatcagccactgtgtattaagacaaagatggaacaggcacactaaaagcaattgagatagcataaagagagatcatccaaaccgagaagagatggagagttggttttgtagttctgacccacgtgtatctttaaaataaactctattttttaagtagtataattatgttgtcaatcttgcctaacagagttaaaaataaatacatgaagaatagggatcacacaagtttgatgagtcccatgaatggaggcaacttcagttgcgtgttgtgtgcaacttaattctccatgtgcatttgcctcttatgagaacttggaccatctttcatcacctctgcagcaatctgctgcagcttttaggcaatatgttaaacttaacacacctgacctgagttttgaatccacagcaacagtagggcagcacctccttaaaagaattgcttcatgtttggagagaaattagcaaagctatgggtacttatctgcataagtacccattagattttttcacagaaacaaaaagtatttggaaaacagcaccgtggaaaaaccaattattctttcaacactacacatatttggattgctatgagctagaatatgatgtgggtgtacagaatggactgcaccaactcccctagcaaagctaatatagggacctgggacatttgatttttgcttgcaaagtgatacatctgtagtactccaaagagagtcaaaaaaatgtagaggctctcagatttctttctttgtgcatttctccttcctgttgaatgttgggaggagttgaccagcctccagggattaagacattcaaagtggtcagtaatttccataataggattcagtgatcagattcaaaagcaaagaacaactaataggaaaggataagaaggatgaatggctgttatagagtaggctctgtaagttgagaaatagagcattcttgaagagagcatttcattagccctcaagacatatacaaatactagatattatgtgaaggtgaggaagtcttgatgtcttcttgtcttatggaagaatttttattctaataatgggttacaagattgaaagaagaacaaagacattttgaatgggacaaaaattgaaattaaaaaatcagcattcatctgttggaacaaagttttgagagcaaatggagctctcagaataggcagaaagaaagaagctaggccagattaattgtggagcttggcttttattgaatcagtgatgtctagagccatgtttacaatatttttctgaaaaatttattagcttacttctttcatggcagaaatactaaataaggggtttaggttaaaaatctctctcaatctatctcacaattcttgcttgttctcttgaccatacgcttgcatgcattttttatgttttaggtagtgatataatgcttgaatgtaaataatgtacaggataaaacaggctatggagtcagacagatccagtttcaactctccatttgttgcttactaagctttgtgatctcaaacttttgagcctcatgttcttcatctgtaaaaagagagatataaagcatacctggggagaattaaaataatatgaatacacacatacacatatattcatgcatacagctatgtacatatacacatatatatacatgcacaaatgtttctgtgtatgcacaggtgtgtgtatatcataatgcatgatttcagtaaatggtaactaaaagctggctgggttttctctgcattggagaaagcagttgcccttctttacttagaccaacattgactataatccaaagtaatagggagctgcaagcctcgatacatccatatcttctctgtttcctattattatagagggtaattatgcaccactgcttggaaatttattaaaattgtctttttgaagtttgggaagaaattaggtcaaaatcaatttatcatatagcataaaatacttgtctgtattgaaaagaggttattttttaagcaatgagaaaagaactccctattcaataaatgttgctgggacagctggtagctgtatgcagaagaataactggacccataccctttaccatatacaaaaattaactcaaaacgaacgaaagatttaaatgtaagatctcaaacgataagaatcttagaagaatacctaggaaaccccattctggatatctgtcttggaaaaaaatttatgactaagtccccaaaagcaatggcaacaaaaacaaaaattgacaagtgggacctaatgaaactaaagatcttctgcacagcaaaagaaactagccaaagagtgaacagacaacctacagaatgggagaatatattcacaaactacacatccaataaagatctaatatccagaatttgtaagaagcataaacaattgaagaagcaaaaagaaaataactccattaaaaagtgggcaaaagacatgaacagacacttctcaaaagaagacatacaaatggccaaaaaacatatgaaaaatgctgaacatcattaatgatcagaagaatgcaaatcaaaaccacaatgagatgttatcttacaccagtcagaatggctattactaaaaagtcaaaaaacaacagatgttggcaaggtatggagaaaaaggaatgcttatacatggttggtgggaatgtgaactagttcagccactgtggaaagcattttggagatttctcaaagaacttaaaacagaactaccatttgacccagtaacacccattattgggcatatatccaaaagaaaagaaattgttctaccaaaaagacacatgtatttgaatatttgtcacagcactatttacaatagcaaaaatgtggaatcaacctaagctcccatcaatagttaatttgataaaaaaaaaaagcggtacatatacatcatgtaaaactacaagccataaaaaagaacgaaatcatttcctttgcagtaacatggatgcagctggagatcattatcttaagcaaattaatgcaggaatggaaaatcaaatactgtatgttctcacttataagtgggagctaaacgtaggatactcatggacataaagatggtaacagtagacactgagaaccactcaaagagagaaggaagggagcaagggttgaaaaactacttattggatactatgctcagtacctgggtgagggatcatttgtatcctaaactgcagaatcacacaatatattcatataacaaacctgcatatgtacccctgaatctaaaagttgaaattatttttggtgaaaccctatctctactaaaaatacaaaattagctgggtgtggtggcgtgcacctgtaatcccagctactcaggaggctgaggcaggagaatcgcttgaacccgggaggaggagcttgcagtgagccgagatcgcatcattgcactccagcctggacaaacaagagcgaaactccatctcaaaaacaaaaacaaacaaacaaacaaacaaaaaaggcattttttattattacttcaaattcttatttttattgagcctgtctacaatccaatcagtatttcagaaacatgttcagtatagagagttgcagctctgtgactgtctttcaaaagttcagaaggaatagagttttcttgccagtgatgcaacctcaaatttcacccaatatgataactagccaagcatgttctttgtgatgatctttccaatcgtgcagtgtaaaatgaatcatcctattcccaatagaatccaactaagtcttgcatagggtttatctatttgaacagataagtcattttgtgaatatgatgtagggattcctcctaagtgaaaagtggtgactcctgataacatggcttaggaaattaaacctaatttatattattttctttttaagagacctgctaaaaagcagacacagagtagagatgcatattagtgtctattaactttggggatttgcagaggaatagtaaagtgttgctttgggtatcttttaaaactttaaaagagtttaatttttgtctgtattgccaaatcagattagaaagagctaagttccattagataattggcatgtgaggtatgaaaatgaattgtccctagaataaaaagatttttttttgagaatgggggtaggggtgagaaggtaagtaacaaatagtgcacatgaggtgaagcagaggagaaaacctagatggcggtggtgttttccatagaagaaatgcatcagcattgtaaggcaatcttatatatgttaaaaataaaaataaaaatagagaagtatacataaataataaaaaatttaaagttttattccaaatcagcttcagatttaaaatgcgtttgtgtgtgtacttatacaaaaataaaacatttgaaaaaagtaaaaaagggatgttaatagtattaccccatagacttgttatgaaattaaatggaatactatacataatgtacttagcaaataaatgcatgctagcattacttcattatttacagtatttcaaaattaaagtaccctcctgtgccccatttctcgttccctctccagaagcaacagctgtggtgaatttgatgtacaaccttactgtctacatggaaaatactaacattttggtgcctttattcaggtctgcatgggtgcatgtacccacacatgttgtgctttaacttttacataagtaagaaaatattcatgtcttcttagcttgtttttttcactcaatttagtgttttgttttgttttgacagagtctgactctgttgcccaggctggagtgcattgacacaatcatggctcactgcagccttgacctccttggctcaagtgaccctcccacttcagtttcccagtatctgggactacaggcacatgacatcacacccggctaatttttaaatttttcatagagatggggtttcaccatgttgcctaggatgtcaatttagttcttaaaaatgatccatcctgacacatacggctctagctcgtttcttttgagtgttattcattactctgtcacataaaaatcccatatttcatttaccttcttccttttaatgaacttttaggtcatttctgacttagggcaattgcagtcagagctatcatgaatatcctcatgcatgcatcgttttgacatggctcagagtttcattttttgttggttttaaataaattatatacttagaaatggactttctgggttataagacatgcacatttttagttttgctagttattaccacataccttccagcaagtgttctaaaatatccttaagagttttatgaaaattcctgtttacctatctctctgatcacaagtggtaatagcatacttcctaatttttagtttcacaaatggcattttactttaatttgacttgtatttccccaattaccaatgaaactgaacatcttttcccattctttaaatatttggatttagtttttgaaaagctttttcaaatattttgcttaatttttctcctgagttatttgccatttttctcattgacttgttggtctttatactgaatagtaatctcttgttgcttgtatattatggtttaactttgcttatgatatctgtggttatacaacttttttaactttgaaatagtcacgtttattattttcttattttatgccttaagctttattttatccttttgcttgcaattgtgttttggtatgtttttatgtacttcaatggttctcaatatttagcacgcattaacaataatacgaagagcttgttaaaattactgaacctctggccactttttcttgaagattcaggagttccaaggtgcgcaagagcatagaaagtcatacaaggtgatctgcaaacacactttgggaattactgcagtgcaccatattggaatcaccattggccagaagaccagaggactgcccttcattgaattattgtctttttaaaaaaaaatcattattttgggcttccttgtctgaacaagctacgaatatgggaaaatgcttagagacaaatgtacagattaactttgagggaatgttgtttatttttcagtccttccaagtgttcctgaaacaaggagatatttgaagtctctccagcctgatatccccagtggaaataagtcaatgttggaacaagaagtatgagcaaccagaatttaaaaaaatcttgctaaggtatattttcattattttattcatgtcttttggtgagttttttttaaaaaaaaaattccttcaaacagctattgcgcaatgaaaagttaagtagagcgtggagtatttaggacacaggcttttaataaaaacaatgtaaggaattaaaaaaaaaagtcaaagaacattataaaaacctggagcatcaggaaaaatagttttcctaactttaaggaatttaagagagatcggacataggcattttccttgttctcagccagatttatttctcatttgtatttatgtgcaatatcaaatgttttaatgttgtggatttgtcctgaatgccattaataaagtggcttcctgtcttagctaaggtaagctattcacccaatttaggaaataactgatccatgttttgagacaaagctcttttgtttaaagaaccttaggattagaatgacaaccaagggacatttgacccaaatcccagaaagtcctgagaatggattttctctgtttagcgcattgctgcagttgaaaacactaaaacagaagagaaatgttcaggagaaaaactcccatttacccaacagaagtaacggaactgatatattctttccacaaaggctttgtttatacccctctgaggaatagatggattctagttaggtgttttggtcagtttattaagaagttgactcaggtcgcaaatctttaggaagtgttgaaaggtgagtcatttcagacatgtcaatcctgttgcaacaaacagcacacatttgcttactttgaatagttatagaaagaaagacattagatgtaaaaaaattagatgtgaattgattatgaaaatgaaggtagaatgaaatggatgaaaacagcacaaggccagagaagaatatctttctgcacttttaatattgtcatcccgtgctaacattttttttttttttgagatggagtctccctctgttgcccaggctggagttcagtggcatgatcttggctcactgcaacctccacctctggggttcaagcaattctcctgcctcagcctcccaagaagctgcggctataggcatgcaccaccgcacccaactaatttttttttttttttttatttttagtagagacggggtttcaccatgttggccaggctggtcacgaactcctgacctcaagtgatccatccaccttggcctcccaaagtgctgagattacaggcatgagctgccacgcctagctcatcccatgctatcttacacattcctactcttccccttcccctcacacttctatccattagaaggaatcaatggggagctttaggattccacatgaactcatcgagtaaatcatacaatttgcttgttggagaaagtgtaccttaaactctaaaatgaatgtgacctttatactgagaatggtaaaaatattctaaaaatgaacaacgtttaaagctacattatctatttttgctgtactccaagttgatattgaagatgctgaatagataggttttgcaatgtcaatgtgattttggtaagtaaatgaaagaaggattccaagtgaacaattccatcatactttcatcatagacttttgaaggcctcaaatatacatgcatagtttttcaagagcctttataaaacatttaatttctgcttaacaactcattggcggacagaaaatttttcagtgatctatttttcaatgaacacagacagccagaatgtcaaacaaagactaaaatttaggggatctgacttcagtctggccagtttagcccataacactgtgaatggccacatgcctcaccttgctcctggactttgacagtaaatatttgaatggtagaaccggtgagaacctgaatagtaaatattttatgagaggaaataggaactccccttttctctgtccttcccttacattaaacatattaatttatattaactggaaacatataattctctatttacccctgtcaataattagtcatcatttgaatcctgaatcctgcttctatcacaaataagatttctttttggcagactgtgatagatctgaaaatcagctaacaaggcatgcaacacttgactgagaaaaatcagaagacttaaataatatacagtgcacatggataatttattctctgatgacaagggtatcaatatattcattcttttctctcttccatctcatcaaattccatctttctttaagtgactaaataagtgacatcctaggctgtggactctctgcctactctgcttttagaatatttgaccgagcctttcctctttttctccgagggacaacagctggttttcattatgcatcagattatgatacacaacaaaaagaaaatggtcaaaatgaatacaaagggagttctgctaatactctagtttgttcttgggggtgtcaaggtgaagaatccatactgttctgtagaccactgtaaacttaatccatttcatcatatacaggagtaaaattcagcagtattttgttaatctttgctgcccttatttactgtgggagaggcgctttggtttttcctcttcttcctttggtatagcactaatgtattttatatgtctttaatctcagttccagttctgtcaatatttgagcttatcttaaaccgaagaactccaaaggagagtcaaagaaagtaaattctcaccccggaaggcaaataacaattatttcattaaacattcaaatcacaaagaacaccttggaccagttcttgatataaataagaggctgcagacttttccaaatccctgcccgtgggatgaacactttaaaggtcccaagatttctaataatggggctaaatttcccaaaatgtgtttttctgctaaaaaatccagtaacaaggaactgtacaaattctaatctctgtatgagtcttcatctttggaatgcctattcctgaagatgagagatggatagtaggaacctatgtatcgatctgggttagcccactgggctcattaatgaaatatcactgggaggagcagcccagcatcctatacgtgagccaagcatttagaattgcctttaggattcttcacactgttagcagccaagaacacagaatcaagttcggatcacaattatggatgctaccaggggtatcatagttgctcagcctgttcaaacaagtattggtttttttcataagcttcactttcataaactctggaggttgtgtttccataataaaagtgagctcaaccttaacaaaaacattgcataaagccacactttttgttttctaaaccgtaactaattaagcactaggtgggtgaccaggtctagctgatgagtatttgctgttaatctgggctttcccattccctatagggcaggaaaacacacgtgtgcatgcacacacacacaaacacacacacacaaagacaaccatatacacaagcatataatattaaagattgaggtagctggatgtttttcacatcttcccttccttctggatcctagcagggatagtaaagagatacaaacattctctgagcataataacttaaggtgattgttcatatggacagtgtgaacattcagttggtttgcagattccacactctgagggcagattccacacattgtcttgactctttttccttctcattctttctgcttttacaccactgatgaccctgtctccatcctgctgggaagtaattagtgctgaaggaatgacaactctagcacataagtggcagggccatgaggatgagaagcaaaaaaagaaaaaacggaaggggccatgggggaactaaatcaaggcagctggaggcaggggcaccttcctctggatgctgcgaatggaatagccatccgggtgccccgaaggtcaagtactgagatcctgaatttacatagaaaccaaaagagtcaaatctagtgacagaggagaaagccgtgctgtccagtggaatgttctttaatgaggcaacatcctataatctgcattgtgcaaagtggcgtccactcatcacagatggctagtgagcacattaaatgtggttagtgaaactgaggagctgaaattttggagcaaaactgagtttttaaaaataatttcgattaatttgaatagccacatacagccaagggccatcattctggacagtgcaggaacagagaaatcactcacaatttctcatctctttttgtgaacactttagcaggctggtacaaatgacatgaacaccagataaagggttgcttatatattattacagatactttgtatttggtgaacataaagaacacctggtacttagatttcccttcaagtctgcagtaggcctgaaaatattaataaatgcatgtatccaaacaaaatagtagcaaagctacccatgttaagcaaaggctttagaatcagatgggattgagttgacatcctagtctccagacattctggttctatgatcttagatgagatattgaaagtatctcatcctttgttgcctcatctgccaaaatagaattaaaatgtcccattcattggaatgtgataataactaaagtaagcaagttaatcaaatactacaatatagggtttgagtgtccctacccttgcaatggctacttccaatgtttaatcataggcaatttatcccaggagtattatgggcttaaaataataagaagaagaataataattatgaaacataataaacaatgaatttagctagcccttcattttaatgtatcctgtatgcattggttaattagctttgctataacaaaaaaaaatcaatatacagtgacttaaagaagagagatattggccgggtgcagtggctcacgcttgtaatcccagcactttgggaggccaaggcgggcagatcacgaggtcaggagttcgagagcagcctgaccaatatggtgaaatcccatctctactaaaaatacaaaaattagccaggcatggtggcacgtgcctgtaatcccagctactcaggaggctgaggcaggagaatcaaatgaacctgggaggcagaggttgcagtgagccgagattgtgccactgcactccagcctgggcgacagagctagactctatctcaaaaaataaaaaaagagagatatttatttctcctccgtatcacttctctgagttgagcagttcaggttgatgtgatggcttggctgtatgaggtttgtcccgcgctccacttttttctgtcttttattcacccactatccccttgagcaggtgtcggcaaactgcaaccaaagctcaaattcagcctgctgtttttgtttataaagttttattggaacactgcctcacctagttgttcttgtattgtctgtgactcctttgatgctacaacagcagagttgagtacctcagtgaccttatggtctctaaaatattcactatttgaccttttacagaaaaagtttgcaaatctctgccctgtgatcatctgcatgttcaaagctggatcaaagtctcaacaagacagcctcgagaggcagaagttacacacttcactttttttccattctacttgtttctgtattcattcaatcaatatttgaacaccaatttgtgctgaccacagctctagttacttggaacacattccattagtaaaaatttagtcacatggcaacctgcagccaccggagggtttagaataaaatgaagcctccaaggaaggctatgtggccagcttaagctcattataattagctttccactttgcaactgtaaattgttacctggcaataggattatgtgattaagaaaaaagtagggaacagatagccctggaagagaaccaggatgaaaagcaagacatcgaaagattttcatatgattaagatttcgtaattgaagactggatttctcaactaacagatgtttatcgagcttcttccataagccagacttagagaatacagtgttgaaaaaaccatgtgatctccatgaatttactacttcataatctaagaaattagtgtgcaacatccgtgtcctttctaagacgcttacttcatacagggaggaacactctatttctcaatgcagcaatcattcttctattgaatagaaattttgtaaaaaacaaacctatattagctttcatcagctttatttctccaaagtcttgtctgcacatttattctttcagaggcaacaaacaaaattccatactcaggtattggttcccttttgatgctccgagaagcactaattaatgttttagaaaaggtataaaggatacgctacatcagggagttctggaatgaaagagaaccattccactgaatttataatcttgcaggtacgtggtagctattgttgtagttacaatacttacaaaatacctaaaaaacagcctaattgacaagcatcctgactgtttgcatttacaagtcaatttcattaaagaattacctcatttgatcgtcacagaaaccacaggatatagatatgactgaagagattaaggagctaggaaataaatctgggactctgaaaacaggtctaattctgatcctgagaagcatccaggttgtttgagaaatgaagaccaataagaatgaaagccaaagaggaaaatgtgggtgtaaactgactataatagaatgctactgtttgcatagaagtttataagaacaaaataagacagaagagaatgagaagatccaggactatgagttcagtattgtgcttgtttaatatcgagatttcagtcctactgaatcataatatctggaaatggggcctcggaaactgagtatttaacgagctgcctatgtgattttgatgaatagtcaaagtagagggctacagtataaagaatgttcctgtatcctgggatgaagcaaaaagaatcaggacacagaagctggcagcggcaatagaaaacagaaagcttagaggacatgtgtccacttatttatctacgaatatttattaaccatgtataatattccaagctctgtgctgggtgctaggagacaatggtgagtaaaagagggaaggcttttctactcatgaagtttacactcaagataaaacctcctaaagaagtaaagagacctactatttgatagcacaacacggtgactatagtcaagaataacttaattctatgttaaaaaaaaacttgagtgtaactggattgtttacaactcaaaggataaatgcttaaaaggatggataccctattctccatgatgtgcttatttcactttttatgcctgtatcaaaacatctcatgtaccccgtaaatagatatacctactatgcaaccacaaaatttaaaaataaaaaaagcaaagagaacccatgatgccagactgaaataaaaacagtaaagcagaggatatttttaaattgctctaagatttctaacataaaatagtaggaaaagcgtggcttcatttaaatgaaggaattgggaaataataatattatgataagaaatacattccccccagtttgggtaagacggggtttcagctgatgtgagggcatgttgaatttggggtacctctgaaaaaaaataggaatgggagaaaagttagtccagggacaggcctaggaaagcaggtatttgtctaatctgatgtttattggaagccatgagaatcaatgaatgtatccagaaagtgagactatgaacaagacaaatctgatggtaacatttttagctttaagactcacagataaaaagccaggcaaagagagaaagtgatcatattcaatgaatacaggaggaaagatgagagcagaaagaatccaactaggaaaccacacagttggaaaccaacgaagaattttgaggatgacgttgaggtcatgaagaggtcaatgagcataaggattgaagacacccacgtgagtaaatcaaatttaacactttggagagcagatttaggaagacaatgagaaataaaggagagattttagagtgcctgacagcaagtaggcagatacaacttagggacagcggatataggtcactaatgaagaataaaagtttaaaaagtagctcgaagacaacctgagcattactgagaataggaacaacaacaacaaaaccatgtaaaggaagtaattgaaaagtacagaaaaagagtggaaaattctataaatgaggaagaaatggctccaggggagttttaataactagaaataacatacaacctttcaagtcattttattccagaaaaagattacctgtatccatttaaacgcaattgttaactgtgttttctttcatttaattgttttaggttctgaacatagaagaggtctgttttcctatcattcgacactgaaatgacgtttccaggataaaattctccaattcatgtcgagtgtgcttatccatgttttccccaggtgaccatctaaccccctcaatatttttttccaccaggtggcaatgccctcttactattgaagagctgaaagctcaacatgacaaaaacagtgaataacctgggtttctgaaagaacattctgacaactgtctttgtttagaaagttgacattttcatcagagttgcctcctggaaaatccattacagattcccaaactgctgattatacacaacctgagaagaaatctaagggaaggtgactggctgctttatatcaaaagaaggtcacctaatgtcttaaactcaaagtgtgttttttttttttagaaagaaggagaaaaggtttttgataatctgaaattttggcagcatagggcagataacagaaagtctgatctactctcaagaaagaaaggatggataaaacaattgattaagaaaaaaaacacaaaatgagagagtgagggaaaattttagggattgatttatatatattttaaattagtaatcaataaatatttgatgaatgaatgaaaggacagaaaagagagtatctgatgaaatgcaatattctatgatctagtactccagaaattgttgaaagaaaaggaaacattttgagaaacatcaagtttagaatatagactggaacaggggtcagcaaactgtgatccatgagaccattctggcttaacacctgttcttgcaaataaagttttattggaacaaccacattcatttattcacaaatcaactatggctgctgccatgtgctgtaactgcagaactatgtgttttccacataacaccaggcccacaaatcctaaaagacttactaactggcccttaccatgaaaagtgtgatgatttctggagtagcatttaaggacatgggttttagaaccagataaatataaacttcagtctcagttctaacacttaatagctgtttgaccttaactaaattgtaagggttaatgtaggccttgcttttaaaacacttagcaccctgctgatacacagaaatcatattactcattactatctctcttgtgtaaactcaatgagaaactgagataatttcctcaactctcattaatcctcaaaaacgaaaatattttgtaattatagacaaacggtggagaataaatgtacctccttttaattctggcaaacctgctttctccaaataactcctctctgtttccttctctttcagtagagtcaaactcttgatgacggtatttagcagttggtaaatgcctagtgtgctgagtctgtgcagatctgatactcttcacagtccctgaccaaagccccggatcctgaatcttacaaaatgcaatggaatcttgaaaaatagaaaagacatggggcaagtattcaaaacttaccctaagtgcttctgaccctgaatagctaaggctcaaaattggcttacagaacatgcaatgatgattttgatggtttttcgttctagtttctaactaattcagtgtttggctgccagtaagggcctttggcaaacacctataggagaagtgtctaaaatgtaaagtgaatcactggaaatgggaactctgtcaaaataagggaattaagttcattaaaggtgtggtagcttaatttactgtgccagttcatactgatcagggttggcactgaacactcagctagtgcaaacccacccaaacttggcagaataaatgaccccaaccaatccagcctcttggctttctctccaggttaaatgtgcttaaattagtaaaaattgggtttggactatgggcctttcttgtcttctagattggggctgtgttgtatcaactccatgagacaaacagcaaagacaactttgctcatggggtagaatggttgacatctccaggtgagaaaaatggcctcaaaagtcccagagtctttgggaactgcatcaaacaaccaaggaatttatgtccaaactctgtaaacacacatttccaagatggcatttaggtagatggcctcttggtagaaaactaagtaggtccctggagagcaagacgtgagagccaggtgaggctgctcctgggatcactataaccacattggacatgatacaaagtcaggaggtagtgtgtgggatgtgataggggtccacttgctgacacacaaaccttaaaacctagatgaggttcacgtgggcatggggtaccatgtcaaaacacagtgtgccaactacttctatgaggagcacggatttgcctcaccatagaagaggagagctgtaggtgtttcaactgacactttcacagatcacttcaatatatggaaatcctattttgcatgtgatttacacagttgaatttattcaaaagagatttatgttgtaatttgctaagtactctgaatagaaaattaaagtgactgtccctgccctcatagagctgatgttctggtagaggagacaggcttttacatgaatagctataatggtatttgaataatagcaaacaacaggcaagggcagggtgctaaacaaagaaaggaattaaagaaattaagtaatgctttgtcaaatggtgatgttggacctgcaccatgagggatatgaagatagtgtcattccctggccctctgcccttcattatgttttctaaaaagggaccagaagatttacttaaaaagcagccataactataaatgcatattcttctctccttttcctcagctccacattttactagcactgttggatttccctaggaccctagtgaaacaaccagaaatttggataagaacatttaagaaaaataacgtatctctgtttcattacacgtggattatttttttgatgtttctttctgtcagtcagaaatggacaggtgaaaatgttatgtaaaccctcaatatcagtcatctttatagttacactagtattccagccattcttttcattaaaacaaataaaaaaaaaacttgggaagagactaccacgtttagttagaaaacagtacagtcagcttctttttttcttttttaatgtgtttttatggtttgcttgtgtgcttttcatcaaaaaattcttactgtcaaattaattgagaaacttacagtaattgatggccattctgggatgtctcaacaatactgctgccctaaataatatttcctaatgattattaagcctgaataaatgagtttttaaaggttgtcagtatagcctatttcataaatatttattgagcactgtattagcctgttttgcagataagggaatactggaggctgggtaatttataaattaagaaaggcttatttggctcacagttatgcaggttgtgcaagaagcatggtgctggcatgtacttggcttctggtgaggcctcaggaagtttacaatcatggtagaaggtgaagggggagcaggcatgtcacatggtgagagagggagcaagagagagaaggaggtgccaggctcctttaaacaaccagctctcaaatgaactactagagcaagaactcactcgttaccatgggtatggcaccaagtcatttataaaacatccatcgccatgactgaaacacctcccaccaggctcacctccaacatcgaaggttacacttcaacatgagatttgcatccaaactatatcaagcatctataatgtgccatgtgctaggcaatgggcatagcagaaacaattatgagcaagacagacacaaacccttgctctcttcatctaatataagataccaatattatcacagtgatgattttaaaaaaagaatgcccaaaagatttccaactaggatgttaaagaggaagaaaaggacaattacatggaaagtaggaatgtggctgagaatagaaaaggcagcatggatacctaatttatagaaaattgacttaaattttattggcaggaagaatcatttatgaccttttactatagcccttagggtttaggttgaccaacggattcacatgaatgtcgtggcattttataaggaaaaaaattgtaacaaaaaagagcaaatgtgagacatgccatgagaaggctaaaaaaatctttatcataaaaaatgagcaagaaaaaatgtaatgactttttaaaaaaaatactgaaacagaaaagttcaaaaatctcttctataagggttatccttgctgcagagattctaaccttggcaaatgagaatctgcttttcttaaccactcttcacttttctatcacttatttcactcccagtattctgcgtcgcactcatttgctgcatacagcagaaaatggttactatttctactttttgtggtgctaatgcattttctctgacaatattcgtagagaaattgtaagaaggaaaaaaaatcatcgctcaaaatatgaaagcaatttcatagtaggtttactggtacatatttgtggttatagggaaaaaagtgtgctccttttcaattttttatagggtaagataccaggcattgcagatatgggaatatagtgaaaaagtctcacataggctacaatcctcaggaaggtgataggtttgctataaaatagcatttagaaaacatttttaataagtgtgctatattaatcagagttcttcagagaaacagaaccaatgaggggaggggagagacagagagagagagagagagagagagagagagagagagagattgagattgagagagattattacaaagaattggttcccatgatgatggaggcagagcagttccatgatctgccatctgcaagccagaaacctaggaaagctggtggtgtaattcaactgaagtccaaaggcaggagctcatggtctgaatcccagtctgtgggcagaagaaggtgagatgagatgttctagctcaagcagtaaggcagaaaagaaacaaacaacaacaacaaaaaaagtgtcttcctccttcctctgccttttgctctgtccagatccccagtggattggatgaagcccacttgcattgaagaaagcaatcttattttactgggtccactgattcagaagctgatctcatctgaaaatatcctcatagacacacctgcagatgtttaatctgggcacctcttggcccaagtcattttgacacaaaaagttagccatggcatgtactaaaactgaaatcatactaagagtgtattctttagtactccatggatgtcttccttcaaagtttagctatttaagatttatgtcattatataaacaatagagaattactctgtttctgttgattgttttttttttctttcagtgttatcaccaggccaactttatgggaatttgaaatactaataacatcaacaaataacaatacatggttggtatctctttaatagttatcaattgggaaaatcaaagtatttacaaaatgtatgcaggaaaccactaaaaccttcagtgagaggaatatcagatactcttatccagtacaggttataaaaagaattgtattcattgaatatgtgtcagaaactattctagaaactttacatagagcagccgagtcttcatgagcactccatgaacaaagttttattatcctcttagactgaagaagacactgagacaagaagcggttaaattacagtatcaggaccccagatggctaaagctggaggctgaatcccctacctgggtgcctatttttaggtatttaggtataacaacatgttctagagataatcagtacacaacagtgacaacatgacctggggtacttttccataccctccttgccccccttatccctagtacaagagttaaaaaactctcagtgctaaacacccagaaagctgagaaaattatatgggtgcacacaggcacagctaaatcactagtgatttcacaaccctaggaaatctctcttaatatattaggctactgtgggttatttagtttttttcatataaacatactaacaacatagttcatattgcactgcagtctgcttttgcagttatcaatatatcctcaacatattctcatgaccttaaatgttcttctaaatcaaaggtcagcaatggatagtccacgagccaaatatggactgtaattttttttgtttgttttttgagacagaatttttctcttgcccaggctggtgtgcaatggtacgatctcggctcactgcaacctccgcctcctgggttcaagcgattctcctgcctcagcctcccaagtagctgggataacaggcgcacaccatcacacctggctaattttgtatttttagtagacatggggtttctccatgttcatcaggctgatctcgaactctcgacctcaggtgatccaccagcctcagcctcccaaagtgctgggattacaggcttgagccaccgtacctggccaatcttttttgtaaataaatttttgttttgagagagagtatctcactccatcacctaggctgaagtgcagcggcacaatgatagctcactgcggcctcgacctcctgggctcaagtgatcctcccacttcagccttccaagtagatgggactacacatttgtgccaccatgctcagctaatttttttaaaaaaaattttgtagtgacaagatcatgctatgttacttaggctgttctcaaactcctgggctcaagtaatgctcccaccttggcctcccaaagtgctgacattacaggcatgagccactgtgccaccataaacacagttttattgcaacatagctatgcctatttgttaacatattatctgtggctgcttttgctagctgctttggccaagttcagtaactgtgacagagaccaaaacatttatcatcttgccgacttctgatttctaataactatgtctaacatgatggtaaacagaattccacaaaagtatttaaacaaatagtgatgtgacattctgtttgatattttcctggaataacaaaacttcccactgctttgagaaaaaaaaaaactcgccaatatttttatgatcaaataaaaaatacatgaacataattacttatcatgggcttcctagaggaccaatgtgtaggatgatcatgtgatctatctccaatgtataaaccagacaggataacaataccatatctggactgtctgcaataaactgagatctacagtaaccctcttaatgttcaacaatccattcattattttctcattttaactaagtctccaaatgcattgtattctggcaactgatgttccaatcttctccctcttctctactttgcttctctttccatcttcatctgaatctgtcttgaggaaaaagttactcgcattctagataagaggacaccccagctcgctcctgatcggtcttcacctgcacttcctgtgttacaaacataaaaatcctgcacaatttcacaacaaattccttggatccttatgctttctctcataattcctgaccacactctctatacaatttgttcactatgtagtatataagttttatgtagtgttagagccgttaaagtgaacatttagagggggaaaaaaaggggaaaaagttaaagaaacagggagtttctttccaaagaatgcttcatggtggctccaactgggcccctactcggaaatgctgaatctcgtgtatgaacccttcagtggcaaaggaaaacaggccacccttattagaaattttctacagctaaagatgtaacatcatagctaaattcagttggagacaggtcgagcaacagaaaccaggagccaaggcagtctagtcggctctgaaatttgattcaggcaccagattatgaatagatttaactagttcgccaaatgaaaatgtagattttggcaccgactaaattttttttttgcagggggtgggggtattctatatgtggagtcccaacacacactgagggatatgaaaaagagctttttatattatataactattcagggtatgttaaggggaaaaacacaattaactcaataaatgccaaaaaaatgttcaacctctttttactaccttatgcatccaaactttctttcttaccttaatttataatgcaagctttttcattattcaaaatgacacagcaccacccagccatcaataaccaagtagttacctatgtaaacttattaaattgcatacatctggtccattctctttctgtaggagcagtgatatgacaagagccgtaactcccatagcaggtaagtagcacattgtcagtaaggatgtggaaatcaaagtttaattgtcctgaggtttctcagattccttttcctttcctggtgagggtggcaatgtgtgcccctgacacaatgcactctaatttccttctatttccttagcataggccctcaaagccccattattccagattttgtgataaacaaatattaaaacaaataaaaaataaatgagcttacatgggatacctttctacctcaacattgcaacctgcttcccctcaatttccagtcttgcttgctttgctttaataaaagtttccaaatggttcttctttaaaacatacttttgcaacaccaaaaaagctaactgcattgaagaatggctctgatgttgttcaatgtgcgcaacacagaattcaataaaaacacatttgattttaaagggatttattgcaagacatatctttagtaacttttgataactctcttttacttataacatggtgtttccagatgggttgaaagataaacaaatttgcttgttgcgtgtgtgtgtgtgcatgtgtgtgtgtgtgtccctcaagtggagttagtctggtaagttcaatggaagaacatgactgttagtctctacctggtgagcaaagaagactgtcagcctctgtgtgtctaaaggtagtgtagtgagatagaggaaacccaggattaagtgtcaaattccggctcaaccattctacggctgcatggccttaacgtaggttcctaatatttctaaaactcaggtttctatctcaacattaaaataatgatactcatttaatgaaatttaaaaacatggtagttattctgagaaagtttctgattcaaaacacactcaatgcgtgtaagtcactgagtgaaatataatgcacgggaaatagtttttactcaaaaaaactgatcattcaagagcaagcacacagtttcaggcatttctgactttagtagagactaatccagtccaaataaatagagtggaggaggtttcttaggtgtcatgtgggaaccgtactaatcaagagagctgctttgtcatttaattcagcttcttctttaggatgggacatttactcccaatagcattaagaattgactgacatctgctttaaaataaaactaagctatatgagtatgcccacataaattctctagatacctaatatattgtgatagaccaatcatatttccaaatccaggcaataagccagattatatcagcatttactatgtcattagtcatttgggtaagcagcatgtatagtcgtatatatgcctatgctgaaagtaaattatagtattatagtcttagtgttagaaaagtctttgtagtttatctagtcctgctctatattttggtaagagacaaatcctaaccacagagataaagtactgtgctcgaagtaacaaagtcaggaaacagagataaacagtattctcaagagttttgtctaattgctcatttaacttatagctaatgttgaaatccctgcacattcctttttatgtgatcagacagttcaacaaaaacactttctgtattggaattcggcaatattctgtaaagaaaatgtggcacatacacaccatggaataccatgcagccataaaaaatgatgagttcatgtcctttgtagggacatggatgaaactggaaaccatcattctcagcaaactatcgcaaggacaaaaaaccaaccaccacatgttctcactcataggtgggaattgaacaatgagaacacatggacacaggaaggggaacatcacacaccagggactgttgtggggtgggggaggggagagggatagcattaggagatatacctaatgctaaatgacgagttaatgggtgcagcacaccaacatggcacatgtatacatatataacaaacctgcacgttgtgcacatgtaccctaaaacttaaagtataataatcaaatttaaaaaaaaaaatctaatctctcctaaactctgaagttagttaagacctttgcagacctcataaccttttaaattctgctttttctttggcaagtttaggttttcttgatttaaaaatgtgattaattaagataaaaaatattaaaaggcactctcaagcaccagttcctaaggacaaatgtgtaaattaaggcacaagtagcacagactataggaagagagggtgtgaaacagacagagagtccgaggagaatatcatcagttttcttctgtgcataactttggtgtgttactcctgggaggaggcatatttattgtttgcctaaattatagtaaaatattattttaaggaaacaaatttcaacagtaacaacatcttatgtactttaagttgggatggtggcgtttgtcagaatgaacgtgtcttggtcgatgggaaaagaatgctagcaaaatagtactaaatcctgtacacaaacacggttctcccaagattttgtggtgtctccaaatcagaaacaagctgaagtgaggaaggtgtgtagtggaaattaggaaagtctcagagacctagctgaacactgaatgtgggaggaaaaacattggattgtggctacctcttaggtatagcaggtttggtgtgtgtggggttgaatgtgtgtttatgtgcgtggtggcagtgttataagggatgctcctatacaacattctggatgtgtacactttaagataaaatagaaattaaaactaatttggcttaagatccactgaacagtcaatccacactttagtggccttgagaagtaaaacctttgctacaatggaagctaatgtcttaaaaggaccaaagagttctttatgtaatcactcagaaggaaccagggacttatattttacaaagaatatgtttaactttgaccagcattagtttaataaacactgaaaattgtaaatctatttcctaacttcaagtgaagtgtgggaagggagaatatggcatttcaaatacagtagaacctactaaatacgatttaaaattttaacgtcttaggaagactgtttttctcttcattctttatgccttgaaagaagattaacaggaacttgatttccccctagcaaaaaagatatattggagttgatcatattacactaggtatctaaataagtggcttacatcttatattctcactaggatacagatatgctggcattatcattcaaactattacactgtgctatgattgcagaaatgctggttgtcctcattaaaaaatatatttctatttttttaaatactctagagggttctgacagtgagagaggactcagaattcacataattcagttaataataaaaactgattcttaacaacttgcccgatctaggatgttcaccattgctgatgaattttatgttttttaaatatgtttttgtttatttgcaatatgtgtttatggatgaagcaaaacatttatgcaaatagattgcctcatggatagagctgaatgtattttctggaatacagagatgtttttgcaaaaatgattgagctgggtattttacccatacatgcttttaaataccacaagtctctagaccacgtatgtacagatagaaaaacaaacaagaaacctctagaggtatatttggattacagatgccagtgacttgtggttgaattttactctgattccattcaggtatgtgatctaggaagtagtaaaagatagatgtttaaaaagtaaaatgcaataaagaagaaagtgtaaaggaacagccggacatatgcatattttctgtctattaatggagatattttgatgaaaagggcctaagtatttagggtatttcattagcagagaaaatacacatgtctttcttatttcatttcactcgtgacaccattgagattttagcccaaacatcatggccacctaataggcaccagggtatagttaccaggagcaatatttaagaaggcaatgttgcaatgagatggttttatctcctacaatgagtatgcattgactttttttaaaaaaaacaaataacatagtgaaaccccgtctctactaaaaacacaaaaattagctgggcatggtggtgagcacctgtaatcccagctattcgggaggctgaggaaggagaattgcttgaacctgggaggcggaggttgcagtgaatcaagatggtgccactgcactccagcctaaaaataaaatagatggaaagctaatccaggaatttaaaaaaagatacactatgttttcttcttacttattaatttagcaggtttttatagcagataaacacaagcataaaagaaatgaaattatcttttaccttcactttttaggctaaattgagtgaaaatactgggtgtaaaataatgtgtcagaacaagcaatatgagatatttaacgaggtgtagtaatgttacataatattgtaacattgatacagctaaagcacacattcagtgtggcatatattgttagtaggtgtgaatgagtttaatatttgtatgtttgtataactttttttttttttttgagataggatcttgctctgtcacctaggctggagtgcagtggcacaatctcaactcactacaacctcgacctcccaggctcaagcaatccttctgcctcagcctctcaagtagctgggactacaggtgcacaccaccatgcctggctaatttttgtatttttttgtagagacgggattttgccatgttgcccaggcttgtttagaattcctggactactcatattcgtgggatttatctacctttgtctttgatgctggtgaccttcagatggggtttttgtgtggatgtcctttttgttgatgttgatgctattcctttctgtttgttcgttttccttctaacagtcaggcccctctgctgcaggtgtgctggagtttgctggaggtccactccagaccctgtttgcttgggtatcaccagcagaggctgcagaacagcaaagattactgcctgttccttcctctggaagctttgtcccagaggggcacctgccagatgccagccagaactctcctgtatgaggtgtctttcggcccctgctggggggtgtctcccagtcaggaggcatgggggtcagggccccacttgaggaggcagtctgtcccttaacagagctcaagcgctgtgttgggagatccactgctctcttcagagctggcaggcaggaatgtttaagtctgctaaagctgcccccacagctgccccttcccccaggtgctctctcccagggaggtgataattttatctataagcccctgactggggttgctgcctttctttcagagatcccctgcccagagaggaggaatctagagaggcagtctagctacagcaggtttgtggtgctgtggtgggttccgcccagtccaaacttcctagtggctttgtttacactgtgagaggaaaactgcctactcaagcctcagtagtagtggacgcccctcctgccaccaagctcgagtgtcccaggtcgacttcagactgctgtgctggcagcaagaatttcaagccagtggatcttagcttgctggcctctgtgggggtgaggtccgctgagctagaccacttggctccctggtttcagccccctttccaggggagtgaatggttctgtctccctggcattccaggcgccactggggtatgaaaaaaaactcctgcagctagctcagtgtctgcccaaatggctgcccagttttgtgcttgaaacccagggccctggtggtgtaggcacccaagggaatctcctggtctgtgggttgcaaagaccatgggaaaagtatagtatctgggccagaatgcaccattcctcactgcacagtctctcgtggcttcccttggctaggggagggagttccctgaccccttgcacttcccgggcgaggcgacaccccaccctgcttcagctcaccctccatgggctgcacccactgtctaaccagtcccagtgagatgagccgggtacctcagttagaaatgcagaaaccacctgccttctgtgttgatctcactgggagctgcagactgaagctacttctatttgaccatcttgcctgccaccttgaccccgtctcctaaaaaagaaaaatctttcaatagatagagatttaaaatggttacaatgatatgctttatgttatgtatattttaccacaataaaaagaatttttaatttccttagggaagttactttactcattgaaagccatgaagttcacttgttactgtttgcatttagtttggggttttcccccacccttgtaatttcattttattggatatgtaaaggatgagcatacaattaaaagtcaaaattgtatagaaaggtatactcaaagaaacatcatttcctcccctcccctgcagccctaccctttcatctccttccctaattagtaacaagtttcattcatttgtatattatcagtcttgtttttttttacgaaattatacagatatgtgtacattttctttttttctgttctttctgtcacaaaaggtagcatactgcatatgtcccttttcatttttcactttaaaataaattctggaaacatctctctttcagttcatagagatgtttctcattctttaaatcagttaatagtaccccatagtatgcatgtaccatagtttattctaccaactattatttttcttatctaccttaatgcttaaattatctcagacttggccagtgaaagcagtctttttcattctacactttaggtagtttacaatattttacaatgacaataccgcaatgaataacttttgcatatgcttttccacattgttaaacatgtgtcttcagggtatattcttaaacatgaaatccacaggtaaaaaaaaaaaaatacatgcattagtagtttagctcagtattgccaaattgtcctccatgggataatagcattttatatttcaaccagcaatgtatgaaagtgcctgttgccttacaatcttgccaatcttgtcaagattttggattttttgtcaatctgataggtgaaaaaaaactgagggaattacaagcttcaaataaataagagattatttcctaaatatctctctaagaaaagagattattaaaggtcatgtctctaatttcaaaatctatgtcatgtgcatctgtaggtctgcttctatggatgcttttcaaaactaaattatagatgacattttcctgcttcttcacatgtcttatactttttatattttatgatatatattatggacaaaagagaagagactgaatcaaataacaattgtccccaaaatggtatacctttttgtgtcaaacagctaaagtgaaggggtaatctcttctatctcactaggagttaagctgggtagtggatcagtagcagctttggttagttccagctcagaactggttctcttgagagtgaggtcagacccattcctccatcagggctctacaaatgtttcaccaagctcctaaagactgtaagatatatttctcctttccagcttctccaggctctttgatctcctcaggatgtcatctgtgtggtatttggggttctgatttaatgaacttgagttatcttttagtttcaagtgttttggaggtgaagtctgacctctccagtccatgacacaggcacagtgggactaagagatagttctaatcaccactaactcagaaaaagtaggaaagaattgttgaatctggagggtctagctttacatttggggctaactttacagagccagttcctctggctgctataacaagttactataaacttcatggcttaatacaacgcagattcattatcttggagtttggtagatcaaaagcctgatggagatttcactggactaggatcaagatgtcagcagggtgcacttgtttctggaggctctgagggaaaatccatttccttgctttttccaacttctagtgctgcattccttagctgatggcccctaccttattcctcagagccgacaatgtcaatgtgtgtcctcacgctgccatctctctagtgttgtctaattctctcttcaacctttaaggacctgtgttattacattgaattaactagaataatctctgcattttaaggtcagctgatgagttgccttaattccatcaacaacctaaattcccctttgccatggaacctaacatattcagaagtttcatggttttgaacctgaatatccctgaggggctactgttctacctaccctggtaccttccagattctctcttgtcattccagcctagggtaaaccttcaacaagagtcttctcattatggaaaaatctctgtgactgtggctggccattgccctacccatgccacaggtcgaattcttgggaagcaggctctgagatggagcccaatgtgcagtatgttcattggacgtgcccttgggctcgtacctgtggagggaggtgtgttagtgtcctgggactgccgcagcaaagtaccgcaaaccaggtggcttaagacaacagacatttgagccagatgcggtggctcacgcctgtaatctcagcactttgggaggccgaggcgggcagatcacctgaggtcgggagtttgagaccagcctgaccaacatggagaaaccccgtttctactaaaaatacaaaatgagccaggtgtggtggagcatgcctataatcccagctactcagaggctaaggcaggagaattgcttgaacctgggaggtggaggttgcagtgagccaagatcgtgccattgcactccagcctgggcaacaaaagtgaaactctgcctccaaacaaacaaagaaacaacagcaacaacaaaaaaccccagacatttattgtcttatggatctggaggccagaagtcagaaatcaaggtgtgggaagatctgctctccctccaaaggctccggggaacactctgtgccttgccactttcaggttctgctggctaccaccattccttggcctgtggctgctacttcaatctctgccttcacatggcctgctcttttccctgtgtgtctctcccatgtgtgtctttcataagaacatatcattggatttagggcccacccagataatccaggatcatttcacctcaaattcttaactttgtcacatttgtaaagacccatttttccaaacaagctgacattcacaggttctagggattaggaagtgagtttacatttttggggggattgggggatagggaccattcaatctagtacaggaggatggaatgcaggactggacagaaggagaagtcgagctgcaatacaggcccaactgcctcagcaagccacacagagagctatgtgactgaaatgcctgttagatttttcctacatcgtgcaaaaatgcccagacctttatattcctgcctcagtcagtcataaaatgtggctgctttgggaagggcaaggtgactgtagctgaagcaacttctagagggttgacagtgctcccaacaacaggagcagcagtgcttctttgaaagggaatctggacgttacatctccaggttcactggaatctactcttgagctgctaaaatctgcttcttcatacacagtcgggaacagctcctccaaccttacctctcattatggtaccatgcaccaggcttctgacctgccatctgtctttctagagccttatcatccgcaatgctagccatgcctctttctataatggcttcccaccagccatggtctgcagagaggggacactgctgagtttcttagtgatgcagtgcattcctgatgacctcagtaaatagcagaacttccatgccttatatccaacgtgatcatctgttgagtttcttatccttacataatatatccactccggcaagccctgtaccctgagttctttagcccttcctccactgtctgctacagtagttctggcattttccctcagttagcctagggaagcgaggaggtgcaggacatcattttgtccatgcttctaggagtccttgcagggtagtaaattctgtatcttggaagagtgcaaataaattataaactctcccttatccagtcttacgctcagagctccccttgtcaagcacactcagaatccagccccacacatgcgcccctggctcctgccagaacgcactctctgggaatggcaatcctttgtggtataggccttttcctccattttcaggccctgtattgtctgtattttcagcctaagacatcctgtgacctctccctagtgatacacctaatggcaagggaggagggaggggtcggatcctcagccacatccctgcctcacaagggagaggcctttggattgtctacaagggaaggggatctttatggggaaggggttcttcatggggaaggatgggccccttctgaaggcccagaactttctgggaagtgtacatatttaaggttttcagggttcagggttttcaatgtagatatctcatcccatatgtcagtgtctcattcttctgaccttggcatttcaagcctgcatggctggaagtttaactttaggtgctctgctgctctgatgattaagtcctgggccccatcttcagctttctctgcactttcactgcagactactttgcagagcctccttgcttcctacaaaaaaataccctgatgtttacactggtctttcaattgccagttaactgcttttagtctttccttatctttttctaagtgtcaaatgagtttagcaacagacatctaatccctctgtcttttttttttttgagaaagagtttcgctcttgtcgcccaggctggagtgcagtggtgcaatctcagctcatggcaacctccatctccaaggtctaagcgattctcctgcctcagcctcccaagtagctgggataacaggtgaccaccactactcctggctatttttttttttttttgtatttttagtagatatgcggtttcaccatgttggccaggctggtctcgaactcctgacttcaggtgatctgcccaccttggcctcccaaccattgtctttttagttactatttctctggtcctttcaaaggctggctgatgcatttcaccagctagaactttcccttctgtgtgtaccatcagcattcatcactagtgaaagttttcacaactggactgtcaccttgtgccacaagctacgtgccacttatcaccaaggatagggtcctcactgccacctgggaagaaggcaattgagctccaaaacccgacttgaatattcgctttcttggacactccaggcattaactgccacaggtgaagttccccaggcagcaatctctgagacagtctaatggatagaatgtttattagaaaccaacatccgtggaagggagaaggaaaaagcagatttaggcagaaagggaagtcaacctacaatgtagacccaatagcctcaaccaaccccacaaagagttcgagaataaaatggccagtcacaattttcctgggttgggccaaaatgtctcagtcattggatatggaccacccctagaaaagcatgcttttgagcgagttggctttctgcagctgaagcaaaccctgaagggattaatagccaaaatctgtcatctgatggcattcccaaccgctgcaccaacaggtcttacttcaaggggcttttgcagggcacacacatgccatcagataggacaactaccccttcccctcacgtgaaaatgactgctgggcattcctcagccggaaagagcttgccctgatctgcaacatcaatcatttagacctcattgtgtctacagaccttcaatgtcattaaagaagaggaatttttagtttaacatcattgtttgggcagaaacaatgatgtttcacagtttcaacagcctaatcggtagtgaaatcccttcagcctttgaattcttaatttcagtttttctatcttttggttctataatcccatttaattcttttttaaaaaattttatttttccttaagttattggggtacaggtggtatttggttacatgagtacgttctttagcggagatttgtgagatcctggtgcatccttcacccgagcagtatataccgcaccatatttgttgtcttttatccctcaccccctctcactcttccccccaagtccccaaagtctattgtatcattcttatgcctttgcatcctgatagcttagctcccacatatcagtgagaacatacactgatgttctccattctttggttttccattcttgagttacttcacttagaataatagtctctaatctcatccaggtcattgcaaatgctgttaattcattcctctttatggctgagtagtattccatcatatatatgtgtgtgtatatatgttccatcatatatatatgtatatatatttatacatcacattttctttatctactcgttgattgatgggcatttgggttggttctacgattttgcatttgtgaattgcgctgctataaacatgtgtgtgcaagtatctttttcaaataatgacttattctcctctggctagaacttccagtctgtgctgatattcaccattttgtcatttcatttcttgagtgctttaatcactattttaacattcttatctgatcacctaaagagggtgggtttaaacagcatggaaagattggggtctagggagagggcgttagagatgacaaagtgacagttctctgagtatgcctttttgtatatgcacacccaatgaattaacaaataaaaccaaccatattttttggaagaatcccaaatggaatacaaacagtaacaaatgaacctataactattactaataaatgacataaccacaatgaatgtggtgggaagaagagaacaaacttcagtaaccagtacctgtactgtaaggctgaagacaaaagaagtttgtgcaaatattgtactgtagttagtaaacaagttagtaacacaaaagttactttatatgtattataggattcagaaaaataggttaatttgttgtggaacatgggagccaggtttcatactgttggagaaataggttataagtaaggaaagttgggaaggcaagaataagccttgtggtggactgaaatcagaggtgtgtgaatttattttaaaaatctagacagacaaatatgcatgtacatacacatatttcctagctccaccaactaagagggcctcaaaacaatcatatcccaggaccaaggagtatgtcaaagacccaagtcttggtttttaaatatctaaagcccaagtcttggtttttaaatatctttttcaagtaaaatggaccaagactccttggagcagggagtgggatagggaaagtataagatgaacctggaatgtcttcttgggctgaaaaatacagaggttttcaaagaattttagaggcatgtctaatgacacaggagccaactggagggagctcccaatggtagaatgtggggcattatgaacaacaaaataaatagtgatggattataacccatgcaataaatgtgggtaagttcaaactaatataaataatggaacatataaataaccaagggaaaaagaaaagctcttaattaccctagaactccaattaataaacatagaaggaacgttggaaatataaaatcagtatttagcgtgcacacacataacaactgttacaagcaagaatcattaatagatgttaaaaataataggaaaattataatgagaaacaggatatatgcatagtctcaaattatttttccacaatatacttatttgttgtaaaaggaaatacagtaatcatagtagagatatctgatggataaccttaaccaattttgtgtgtgtctgtacatatataaagcaatgttttatatatatataacaatgttttatatacatatataaaacaatatttatgtagatgtttatgtaataatatataacaagttatatatggttatatatgtatatgtatgtgtacatatacaaagtttatacatatgaaacaaaattatatatagttatatataattttattttaatatataattttataattatgtatatactattgtttgatatgtataaaattttgtatatgcacacatacatatacatatatatgtgtgtatgtctatttaataaatgtgaataatataggcttatgaatcttatctcaaagctaattttatttgcctttttatattatatctctggatgctaattggtttcaaagaagaacattgaaaaggcttggctttggccaggcacggtggctcacgcctgtaatcctagcactttgggaggctgaggcgggtggatcacctgaggtcaggagttcgagaccagcctgaccaacatggagaaattctgtctctactaaaaatacaaaattagctgggcgtggtggtgtgcacctgtaatcccagctacttgggaggctgaggcaggagaatcgcttgaacccgggaggcggaggttgccgtgagccgagatcacgccatcgcactccagcctgggcaacaagagcaaaactccaagtcaaaaaaaaaaagaaaaggctttggcttttggcaagtgcaagtggggtaatggggcatccatgaactttcgcctttagctcttaataaagcccataatatgatttgtttgaaaaacattctataagattacagttttttgctcttcagaattttttttttaactctgtattgaatctgcttattttttgatgaactaacccctttctgttttgtccgaaaaacgtcacgggaacaacaacaaaaccctcatctctgttacgaagaaaggggcttactctgccccgcaatcccatgcaattccgtggttggttggaagcatttttccacatgcttccgaggttcataggggaattattttgatccagaaattatctcactaagttggaaaccagtggatttcacactgagtaagacttcagcacagagaatccacatgctgattttgatattcattaatcatctggctaatttgttttaacataggagtgctgacagcaaacgaatgttatcccagcaatggtgactgcagaattgagactattatggcattaacgtttacgaagctggcgggtctgtgttcatatatggtcagtgtcgtctttcactctaattgcaaatatatctatatttaattcacatctgctataatcattgggtgggctagatagggccagtgggataaatagattacaactttttttcttattgtgattattaggccaacagatatattgaaatcctggggtttacgaatctgtctaataagtatatggattttatgttaatatttttcagttaaaaatgaaagtaaattttcctgtgcaatataccatgtatttatggcatgaattttacgtgtcttgcattacatggtagtgaaattcacccagatgaggaaaagctttgtctacataaagttgaagaacataaacacatttatggattactgtcttagatttctaaagtattacaggtttagaaacctgtaatagtctgcacatagattacagatataggcattttaacttttcaaaatagctttctctttttatattactcacacttcatctctgagatttgttttcttcatgttattaaaatgatgcttaaacagattaaataatgtatctaaagccttttaacttgttagcagttgaatgggactctaattaatgtccactgatccccagattcaggaactattcattaaccaacatgatgtctgttttaggcacactatggcttatgagttttgataaaattcaaagctaaacctgggatccgtaactcagagagaaaagctccttttcttccttcaaataagtaacatgcatattcgcttgtcggtgtcttctcaaaataaatattcccaggaaagaagatagtccatttttcctgaattgtaactttctaaggttcttatcaggaagtatttaacgtttttaaaattcagtttattcactgagagaaatatagtaaatttctttcattgattaagagacgtagaatgcaagaaaaaaaataagctgtttgaaaggactcctgctaactgcaccaaactacaactattacccagtaagataatagaggaaataaatggttctttccctgaagtgtttacattgttatctacagtctcttaaacagtagcagagctgtggttctcttgatttgctcactcattctgttattagagaaattcttaacttcttccatggggaactatttttctgtcttcactcttttcctagggcccgttcccagttcatcaggacactgtcagaatgtggaaagtgtgtgtatgcttctttcttcccatatgtggtgtggttgcacagttatctcccacacctaatgagcgcacagattttatgcaggacaaaaggtgattacacatttccagtcaatttgcttctgcaatgctggccatacagatgttggaatgaagcatgtgtttacaaagctaaagatatgtgcagtatagacagaggaaaattttttcacagtcgacaaaatatagcattacttactgtgtagagtgaaatccattgataaaacagtgagttttgaaaaaaataatattagctctcttagatatgagttgtaactctagatgataaattaactccttataaattaactaatttttaaggagacttcattaaattaagcatttaattgaggaaatattgccacatcggaacattaagctatctcttttaaggtcaggggaaagcaagactattatgcctaaaaaaatactaggctgggcacgatggctcacgcctgtaattccagcactttgggaggccgaggtgggcggatctcctgaggtcgggagtttgagaccagcctgaccaacatggagaaaccccgtctctactaaaaatacaaaattagctgggtgtggtggcgcacacctgtaatcccacctactcaggaggctgaggcaggaggatctcttgaacctgggaggtggaggttgtggtgagccgagactgtgccactgcactccagcctcggcaacagagtgagacttcatctcataaaaaaaaaaaaaaagaaaaaagaaaaaatactaatggacttcagccacaaagttgcttaaggtatgttatttcagaacccactacaaacattagtccccagtatctaggtttataccaaacttgtccaactcatagcccatgggctgcatgtgacccaggacagctttgaatgtgacacaacacaaatccgtaaactttcttaaaacattatgagattcttttgtgactctttttttttttttttttttttttttttttagctcatcggctattgctagtgttagtgtattttatgtgtggcccaaaacaatactccttctaacgtggcccagggaagccaaaagacgagacaccactggtttttacaaataccttcttatttcaatttggtgttttaaaccaaaattcagctccttatagcttacttattttgtattattattgttctttaaccatttaacgactataaatgtaacacatttttaatgggctgtaaaaaaaagttaagagttttcttatagatgattacaaaataaaaacaaaaacaaaatgcataacattatttgagtttatgtcagtttaaggtactaccatcttctaacagactgaaacagctcctgtgttacaaagttataagggttatttggatatgatactttttggttgttgtttagcaatatttaagttttacttttcctgttatatgagatagagcatgcaccatataatttgataataattgttagagaaaataattattttaaattatattttagaggctgcaattaacatcttatctgggaatttgagtattattatttaatttactatgtaaacatgtaattcagtacatttatataatttgtttaagtaaattacttttaagaaaatacatagaatacgtgcttttgtctgaaaccagacaaggatatcctcagggcaattttcagtgtacttatttacttttttccatctagaaccctaacaaggaagctatcctagagcactcttccttcaaaattaatcataaatcaaggacaaacgacaggtctctattttagtgtgtgaagaaaagcttatttgaaaataattctgtagtgatgttatttggcttgaggggcaagacagaaccaaggtgagaaggggttttggaaaacaaaattttttgttttgtgtttgttttgttttgagttttgttgttgtcgttgttgtttatccatttaggaaaattgaattatttctttatactttatcccagcactttgggagactgaggcgggtggatcacctgacgtcaggagtttaagaccagcctggccaacatgctgaagccctgtctctcttaaaaatacaaaaactagctggatgtggtggcaggtgcctgtaatcccagctacttgaggggctgaggcaggagaatcacttgaaccctggaggcggaggttgcaatcagccaagatcataccactgcactccaacctgggtgactagagtgaaattccatctcaaaaataataataatgataaaatttttatacaatttactttgatcattttattactcttaattttactaaatataatcataatatcagaactaacatttagcattattattattatttaagacagtgtcttactctgttggccaggctggagtgcagtggggcaatcatagttcactgtaaccttaaactcctgggctcatcctcttcccatctcagcctcccgagtagctaggactataagcatgcagcattgcacctggctaatattttaattttttgtagagctggggtcttgctatgttgtccaggctggtctcaatcactcggcctgaagcaattctcccaccttgacctcccaaagtgctggaattacaagcataagccatagcacctgacctagcattattattaatcaaaacatatacattgatgtaatgatggcttttaaaaattattgctaatctttaagacaaaaatgctgaattttcactcctgatgaatcacaatgaacttcctgttggttctttaagtcctataatcatatgtggaaaaaaagttaatcactaatacaaataactgataattgtttagttttccttaaaaaccatcaatcatgtagtcccaagttagcataagagaaagccaaaacaaaccaacaaaaaataactcgaatgacctatcgtggttccaaataatacctagcctaacaaggacttttctggaaaatcagagcctctgtgtctataaactcataagtcagtcctcaaaattcctacaatacttttggtttaatttttcaggaagagagccagggaagaatacgctatccaaggttttgaatacctagtaaaatcatgacttgcctttctaattgttttttctaagataattggttatgtagacataaaggacttctttgataacttaaatttattttgtttgcatttcccaaaaaagtaaggccaaaataagtggaataaaactgacctcaaatgatactcaaagtcaatatttgactgtatttgacagcacttaataagctctaacacatttataatcaggttaatcaagttaaatgtttaaacaagtctcatccaagagtgataactccaatgaaataaataaaggagaaataagagatatttcttgtaatttatttctagctggactggagagagagagagagagagagagagagacttggagaaatctcccatgagaaatgagaacacagtctcctgatatttctaacctgatttccaggccagagaaattctgatggatatccaaactctgaatggctatgcaaatcaaacttatgaacctatggagagccattcttcattaagcttgacttcagtggggaataagcagtaagaacagatgggctactaaggcaaaaggtctccatgcaaatcatatcaagaaagaccaaaaccaaggaaaggatagccatcgtagatccatgattgtttcagtctgccaaaataaaaggcttttcaatggtttatcccagatgacagctgatttctaaagaagtagccggatttttttttctatatctctgcacacaaagtgaacacagttcataggtaaagaacaaagcacacttgcttgtagcaatgatacaaacttaaggggtccatttagagaattcttattttgaatgtgattaattgcatggaaccagaatagaattaaggaaattaaaattcagactcacttaggggaaaggtcaaaatgagaaccagagaaagggcatccaaagaacacatgtgtagaattctgggtgataaaaagttgaggcctgtcggcaagcataggctaccagctgtgttgtggagtttatgaatcacgaagtgaattcagcagaagcttccctctatgaatagtttatgggaggcataataagaacaggcaaatctccttacatttccaccaagtgttttccatagcaagcattgtaagacatgccaattcaacagaaaatcgtatcataaaattagaaataaaatgtaaaataaaatcaccaaagagagatttcccttgtagtgtaagtgaattaaaacctaaagtcttccattttccaaagttgaattggttggatcccaaagaacttaaaatattcatttattgattgtaaaattagttcaacaaacactcttttgtctctgcattcttttcttctgcgtttcacaaatcagtcatttgacggaagacgccttgttctgtactctacaccaaggagagaaaaataattttacacactttcccctatagcagtcaaaatgaaagggaaaaataataaatctagaaacagtattggtggcttctttttccacgttatttattctttttcttccccacgttctcccttcttcccaatctattctcttccctttctcttttctctcttaccgtctttgttactctcttctctcctttctcctcttccctctctctgtttctatttctttccatttttcctcctttttaaaagaaaagttatgtttctaatgaccacaaaaatcacattgcagacctgaacactggagtcctgtctctctctttaggttctttgccacgaataaatgattttattacaacagaaaaaaaataagggaagtgacatttttctttcaaatattgttgatatgattacttgacctttaagataggctaaggaataaaaaggaaggattctttctaagggttttcttctcaaggccctaacaccaagtgtagctgattgttcacagcattatgaaattctaaacccattccatgaacctttacttagaagcagacttggccgaaaactttccttcctccctcctccctttttcctctctggcttttggttgttttcccttcatctgttgtatgacatccaagatttcacatggaaacaccccatggcttgtttttcattgcaggttaaaatcaactttaattttgttatttttccccctaagatgtcgcccatcccattaacatgattaggcttttcttttgaatcattacctgaggtaaaaatcttattggcacgttggcccctgaaaaatgaggccaaaggcgaggagttgtgcccgccaggctgatacatggcaagccgtcagggccgaggctcgatttcacaccatgatttaagataccatgtgctcagctcagctctgatgataaagcatccgtggttgttaagaattagaaaatagaactgtgtttcctcaatagagaggaactaaccaacatcaaatatcacatttatgtgcattaacagccatatattgaatgacaaaatgtaacaaaggttcctgctagagagacgtcgactgcttgggttagctgacttcaaagttttgtgctgccttttgttcattattggaagctctggtattgccaacaggagctacaaaaccatccatttaacggtataaactaaattatgtttcacaaactgggtttccattgtggtaatatgatgcatacaaacatggttaaatagaagacataggaagagatgcaaatagcagcttcccatgctttcttagcaaaaaaaagagcactgtacactcaatggtatattatgcctgaaaccaatcagtgattaaaaaggttgttttttaaccagactggagtaaatatttagcctacaaaaaattatgtaaaaaaattatgcaacactagtgaggattaaaagagcgaatagagactaaattacatagaaaacatttatttttacttttccactctgtataaaactccatcagacagggtcaaagacaatcctggcatggccaggcacagtggctcacgcctgtaatcccaaaatatttgggggccaaggcgggctgatcactggaggcaaggagttcgagatcagcctggccaacatggtgaaatcctgtttctactaaaaatacaaaaattagccaggcatggtggtgcaggcctgtaatcccagctactctggaggctgagggacgagaatcacttgaacccgggaggcagaggttgcagggagccgagatcaaaccactacactcagcctgggcaacaaaacagagataatcctggcacatctgtctttgcagtggcaacttctagatattaaggcttgaattctcaatgtttccataagagaaaattaatgtaagtgctattaatagtaggagtatcagggatttggaagcagaattgacttcaaggaccatgatatcggggttatttctattcttggccttttcagtatgtaatgaaattgagtttgatcctttttctctgtactaaaacacctaatgtcgcttggacattaaaggacttctccatggattaagaataaaaaaagaatctaatttttagtctgttgtctctatgaatatatgaagagaaatagaatcgtctttccagaagcagcttcctgtagtcacagactcactaccccagtgaagacaggttcttaccccagtacagttgagaaggtatattgtctttcagtgatgcctgtatctcaatattagaaatattaatgcaatattaataacaaaaatgtaaatgcctgtaataatcattttatgccatcagaagttctgtgttgggaatctagagcaagctgtttttatcacaataatatttgttgttagaataaatgacaaactgtctggtttctaagtgtaataaaaatgagggcttaagcatagaacttcctgagttctatttggttggcttcaaatttgattggaatccctttcttttatttatgtaatactcttagaactcccagaagagtgttgaacaggcagtaagagaatatttgccatgtaaaatttgccaaacagactttggtcgtatcactgatatttggtgccaacaaccatgagctgggactgtgagctaggactatccttagttttcactgtgtactaactaaactgtaagtattttgggtttcttggaaatgtatattcagagaaacctccacccacaggccaagaacggaggtgagggattgctggcttccgcagtgaacaatttctgcctcagcagcttaaaagtgtttttctttaaacaagctctctgatttaatatcatgttgacacgttgccattgcatacattttacaaaacagctttatcccaaatgcccacccgctgatgaatggctaagcataataggtattatgataaaatactatttgttaatttaaaaaggaatgaaatacctttttacttcattcgtttacttcatacatggaacaacatagataacccttaaaatcattatgcaaagtgaaagaagctagacacaaaagagtacttagcgcaggattccatttccatgaaatattcagaaaatgtgaatctacagagacagtaagttagtgcttgcctgggaagggcagtggaaagaagtgggtgcaaagggacacgagggatctcatggggatgatggacatgttacagttagcctgcagtgatgcttgcagaattttatagatttactaaaatcactgaattggaaacttaaaatttctaaactttatggtgtataaaatatgccttaataaagctgttcaacaacagcaatgaaaatctcacatttgttcttttttttttttttcagttttaacaccaatgagagaaaacactaccttgtttagcatcattgtcctaaatatttttgtagtagcaaaacaggataacttgtaaaaggcaaatcataaggaaagcactagtcattagaggcatatatgtgatatcagatttgttgaactgttgcttatggagtatcctcacacaaccatgtgactctcagcttgatagtattggagcaaatgacgagtggagaacgcaggttcacaaagcttcaagcatccattttgggacttaaattatcttcattcctgcttatatttaactaattgtctaaaatgttgacccaacacaaaaccataagggagactcatggatgattatttatttatttgtgtttgccatgccctctctgcaccatcagatgttttacagattaagaagactggaggggaaagttctgcacaagggaaaacaaaactaaggctaagttttctttctgtcattactttcctccctctcctttcctgctccttttttgccccagccccttattgcgactttgacaaatgacaatgcaagaagagaatttatgttgggtcttggagattagcacattatcacaagcaaaacagagccctcagcctccgccactggggagcaattgaaagagtctttgaatgtgatgcatgggtcaagacctatttctgacgaagtggggatgctgttatgccaggataagtctgtatgaaaacccttggagagccaggtgaagacactgagcattggatgaggagtatttagccaaaaagctcattctggaagggaaagaggagccgggtagctccctgaagacctctgtgttgaatgatttaaggctacctgtaggaaatgccttctgctttattgctttttagtctcccttctttttgggggggcggaaaaagaagcacaacacagatctttccttcctttgactcacattagtattccgcagaatgtttgagtaaaacctccatctcactacctttcctgcaagtctcttctacaataacaagacagtcttcaggtggaggtcccagattagactactctgggcgatcaaggatttcaatttttgaaaaatgtttgattatatgcacttaaaaaaacttgcatgctcagtttacaactttgggctctaatatctgagaatattagtcacaaaacaatttcaggaacaaaacaaatacagttttgggggctgaaatacacttggggtccacacaatattaacccattccttaattcatcagaacactggacaaaataattctgagaatatattcaaaagctgacttgtttctgaaagtcatgaatagccaaatataatttttctttttttttgagatggagtcttgctctgtcacccaggctggagtgcagtggcatgatctcggctcactgcaacctccacctcccaggttcaagcgattctcctgcctcagcctcccaagtagctgggattacaggtgcctgccaccacatccagctaaattttttgtatttttagtagagacagggtttcaccttcttggccaggctggtcttgaactcctgacctcgtgatccaccctcctcggcctcccaaagtgctgtgattacaggcctgagccaccacacctggcccaaatatgatttttctagatattagacatttagttggttacttgatgttcacaacatatcacaaataaaaaataagtgagtcaggaaaaacactgaatggcagataatgagacagcattcataacatgccttcttagagagagtttattggtgtctcagagatttactttaacagacgaaggtttctcaacctaagaaccgctgacatttggggtccaatcattctttgccattagaaatgtcctgtgcatgataaatctttagcaacagataacagtagcgcccaccaagctatggaaaccaaaagtggctttagacattgtcaagtgaataatatgctaatggcttgcatttattcttatttccaaaaacagaaaataaaagcatgagccctgaagaagtcagaagcaaactatctctgatttgctttcctgactgtttaacattgagcaaatacttaaccaaatcattttactttttttctatataaaatgtggaaaatgatagaatctagtctataagattgtgagaattaaatgaggtcatccatataaatcacttagaaaagagcttatcttttggtaattgtagcaagcatgtgttgcatgcttactaacacataccttgccccgtgctaagagtcagggatatgctattggccaagatggaatcaactttatatggttagatgtttttttatggaaagagcacactggtggcaggactattaacaactgaggtgggtgaggttggagactgagagccctattagaagatgattttggaggccaaggagggtggattacttgaggtcagaagttcgaggccagcctggccaacatggtaaaaccctgtctctactaaaaatacaaacattagccaggtatggtggcacttgcctgtaaatcccagctacttgggatgccttggcaggagaatggcttaaacccgggagtagaaagttgcagtgagccaaggttgcaccactgagctccagccggggtgacagaatgagactgtctcaaaaaaaaaaaaaaaaaaaaaaaagaaagaaagaaaagaaaaagatgattttaatactacacgtgaaaaataatgaagcctgatctaaagcaatagaagtgaaatggagaaggaaaagtgtgacagctactgccatttgatatgggagataatttagaatgaaaaatctagaaagaatgatcagatttctattttcttgctctgagggcctagaacatgctgtgatttatttaacgaacactgaagtagcccttattgtatgggaagaactatggcaagcaatttacaaatattaactcagtttatcacaataacacttcctatgaaataggtatcgccattatatccctaaagcacataagaaaatggaggcatgtggaaataatatcacttgtccaacattaacattactagcaaatggccaatcctggattcaaatccagtcagtgaggctccaaactttatgacctcactactaatattccctgggcacataagaaaagagcagctttgtgggaaatagaatatattttcttgaacatttatttacctttagttttctgtggaacattatttttctcaacaagttcaaaatgttagtacattttaagaaaatatgaggcaaacatttatataaaatttagagttcatttaaaaaaattcagaagacattctagaaagtattcatgtaaaatgaaatcaagaaatgtaacagaccgcatgaaaatgtttttaatcccgtcgtaatagttacaacccagaatcacaataataattctatgatttgtttgtctctaaagaaagccaaactccatctaatagacttggcaggagagcaaagtatgtcgacgtattttttaattttgtagattctttttggtctccttgctaggcagaaattgctatagttgttaatttcagccattttcttaccaccacccgacacacacaaatgcacacactcacacctattcacacacacacacacacactctctctctctctgtcacacacacacactccttctcttatatatattgatgtctgcatttatgtctgcacctatgtctatgtctatagcatatacatcagcatctgtgtctaaaccctgaccctgtcaactgtcagacgccaggattttctagttgcagaatcactttctttgtaatcagagcatctccaccctatattaaacttcttcagtgttcttctttcctcagatttaactaatctgataaaagcattcatgctaggacatcagtggaactcttctgttatcatttgatatgatacttgaagacaaaaggatggtagaaaagaagtagaaacttggagaactttggcaggacaatgaaggatgtattttgtgtagaagtaccttaaagcctacatttgctgtaaagataactcttcacagagatattttatccagaaccatgattcactaatattccaagattaataacttaatttcaaaaacatagaaaagataaaactatcctagatagcactttcaaactttactttgattataggtgtcagttggtaaaagtattggtagagtctgtgaatacataggtttggtaaaggcttaatgacttgataaaagtataggtcatttttgtaaggtcatgagtggttgattaaagcaggacacattactggcagctgtttaagtctgacaacacaaattaaaacactacttggtatggtttggctctgtgtccccacccaaatcccacctcaaattgtagcctccataatccccatgtgtcaagggtgggaccaggtggaggtaattggatcagggggttagtttcacccatgctgttctcatgataatgagtgagtctcatgagacctgatggttttataagcgtctggcatttccgctgcttgtactcactttgtcctgccaccctgtaaagaaggtgcctgcttctcctttgccttctgccatgattgtaagtttcctgaggtctcctcagccctgcagaaccctgagtcaactaaatctctttcctttaaaaattatccagtcttgggtatttcttcatagcaatgtgagaagaaactaatacgctactatagaaaaagaaacatagatccttttcaaacctgatattatgaatttgctaataatatcacctctgtaatgtaattatctgcttatcttcccttatattttaaactctgtctttgcttttctttttctctatgtgtgattctgaagaggcacaatgcaaatgattgtattgatattaatatgtgtgagtagtggtgtatacacaggtagataattgactgtctatgttatttttgctttaattaatgtaaattagtaaagtttattttgaaaatgttctctctattggaagattttaaaaaacaataacttacaccaaaacaattgtcctttgtgaaggttgaactcattcaggagataactgactcgtcatctaacatctcataagctctgaataaaaagtaaatcagtattttaagaaagtgcatttgtgattttggacttgttgtattaaggtgaaatataatgtggtttgtcatcaatctctccgtgtggcataaaagggctgacttgttgaaatttcataggtttttatttacagagaaaacaagaccctgttctgcccagagtcctatcagtccacacattcaaaggaatcacatttgaaaagagactgcttaaatcacaacctttatggataatctaatccataaggagaccaaaattactttgctcctttgaataagaacaaaacctaaagaatttaattatttgcgaattattcatgaagattttgatcctggctcaaggctaggttggaaaagacagacaatcacagattgttgccaatcagtgtttcgtggaagaaaaaatatggaatatttcagcctcaggataacaccccatatttccaggttgttttttttaaaaaaagaggtgttgctagagacaagtgaaccttgggtggaaacagaaatgaaagcagaccctctgagaaagaaatgggatatggactgttgctgggaagaaattattgcaacgacgtgtgttgtttagttataatgctcagattataagttacattttgtgagaaacatatggccacatgctaaccatccatatgccaaagttaataaaatcgaatcccactgatgtaccttgtaatactgaccttacttagtggttggaaagtccataaatgtagaagtgtaatacacacacacacacacacacacacacacacaccccaatcaatcaccaatttatctggtgaatacaagtaattgacatgtacttactccttgatatgaatggcttttgccaaagtaatagaaatgagaagagatcacaccccaagatgtgttagctgtgctcttttcataactttagcaggcaagagagaggcaagggattgaggggtactaccttatatgagatatttgtggaagcccttgctaaggtggcaatgtttcttctgagacatgattaatgtgaaagggtcagacaggtgtgaatttcagagaagagggcttcagaggaaatagaaaatgtgaaatccccaagtctggaatgtgtttagtatattagaggaacaacataaagccaatatgattatttaaaaaggacagaatagaacaagatgatttaaaaaggagataaaagaataagatgatttttaaaaagagagtatagaagaagatgattttagaaaaagagaatagaataagatgaagtaaaaaaaggagtcaagggactagatcccagaggtctttctgagccaaggtgaagagtttgagttttcaagccaagggcaaaagagaaagacattggagaattttaagtaggtggatgaactgttgaggcccccaaatggaaaaaaaacaggaaattgttcaggttattctagtcatttagtgaaataaaatgatggttgagatactctagtcatttggtgaaataagatgttggttgagatcaagataaagcgtgaagatggagggaaattgctggagttggtatatattttagaggtatagctaataggattggagagtgagaggcagagagaaattaagaattactcgactgtataaatttgaataccatgtccctgactcttaacacggggcttaatatgtatttagtaagcatataaaaaatgcttgctaaaattaccaaaagataagctctttttcaagtgatttatatggatgacctcatttaattctcacaacctcctgggctagattcttttttcacattttatatagaaagaaactagagttaagtaatttggttaagtactttgctcaaagttaaaaagtcaggaagtagcagtctgggaaagcaaaccagaggtatttgcctgatgtcttcagagctcatggttttattctctatttcaagaaataagaacaaatgcaagtcattaatatctgttccagaaactatatccatagggttcttgcttaatggtatttctactggttaaatatattttatccttggttcttggtttaatgataataatcatagctagtattttttgccaggttcccatgggttaggttctagacattttacatttactaaattaacaagaaaactatgagaaaacacaagcactatttctgttttataaatgagaaggttaaaggcagagattttccttcaatccattgcattccaaagctgacaattttaatataaaagttattggaataaccaattagcatatgaaagtggtcatcacccacaaaatgcaaattataacaacattgagacattactatacacccattaaaattgataagacagataaagccaagtgtggcaaggatatggagaaaatagaactctcatgcagtgctgctgagaatttaaaatggtacaattatttcagaaaatttttatcagcctcttatagtgtcaaatattcacctattctgtaacccagtaattccactctcaagattatatccaacagagatgcaaatactttgtggcagctattttgattcatataatatttagagagtacttattaggtgccagggaggatgttgaattggtcagtgttcttcagagagacaaaaccaatacaatgaatagaaagatatttattataagaaattactaatgtgattatggaggctgagaaatccagaccaggagagtcaacaggatagttccagccccagttcaaaggcctaggaagtaagagagccaatgaggtcagttccaaaccaagtctaagcccaaagtcaagagaagtctaatgtcccagacagagagagagaattttttctgactctgcctttcattcttttcaggccttctgcagattgcatgaggccccacccacactgtggagcacaatctgctttattcagtctgccagttcaaatgttaatctcatccagaaatacccgcacaaacacacccagaaataatgtttaatagaatatcttggcaccctgtggcccggtcaggttcacatatacaattaacgtcacggatagtgaaaaacttaaaaatgttatcttactttatatactatgaaaaacacccactaggacgatcatatatattactgtgtctgtatctattgccctggtgttactattaatcgcatgcattctcacttcaaagtgccctattgtgaatagaaaattatttgataacccaaatttgaatccattaacctcttataaattatggtatcaaacatgatgttaaaacttgacaccgtccctgatctaccctcttctaagtgatttaatagggacaaggatacaaagcagttaactgttttgtacactggttaaaaatcaaacatctatatttgcttgaggaaggttattgatatggtttggctttgtgtccccacccaaatctcatctggaattgtaatccccaggtgttaagggagggacccagtgggaggtgattggatcatgggggtggtttcccccatgctgttctcatgatagtcagtgagtctcatgagatctgatggttttgtaaatagcagtttcccctgggcttttctcttctctcttgtgccgccttgtgagaaggtgcccattttcccttcaaccatgattgtaagtttcctgaggccttcccagccatgtggaactgtgagtcaactaaacctctttcttttataaattaccagtgtgaaaatggaataaaacagttacgtttccatattttcacatcaaaaatgcctcttaatatggaatgtcaaattcttttcttagctcttaacaaaatggaatgcctacttctctttcattaataaagtgcaagtgctactttatagacagttctatagcttcttaccttatattttaacgtggtatttggtttaatcaaattgatattagtatggattatctaataggattctgaaaaccatccctaatgtcaatagaataaacataactcaatgaggactctaagccatcagattctttgctctctcatctctaatgagcaccatgatacttcccaaatcattcttaacatttatacatttctttcctctttctccacagcctctttcctagttgagtcttacctttattttatctctcttggattattttcctttatgcctgttttccatgcctctagaactttcttctttcaaaacatcttttgttgattaatctccaaaatacaaacttgatcatggtttcctcttgtttaatagattaaatgggtccctgtagcttgggataaatgaaccttcattacatagctcgctgcctcactgactaccagtcccttcctactgtctctgttctagcccttttgaactaaccaaagtgttcttttactcccttatatctgggattggaggttttagaaatcctagtttctttacctgaaacatcttccccaattctgacctgggtaatttttatttgcatttctggtttctgcttaggcatcctattctcctttaagctttccctgatccagaaaggctccagttgcccatcatatcctgcaactattatgttctaacacttattaagccatgttaccattgtctttataattccctgaccctcctttactcttccataattttatgtctctagaaaatagataatctgatggcaaaggattattgttattttatgcatcctcatttttctgggatctcttgaattggttgatacatagttgatatatgctatactataattggaaatttgtaggtatccattgggtgatggcacatttgtgttacgtgtttataatgtttatgtctattgggctttgtcataaagcctgaattctaacactaagccgttatctaggttaaaatgatttttagaaatgtgatacataattataataataatagctgattaagtaatagaacttactagtctctagggtttttatcggcaatagatggaaggtagtgtatttataatgatgtctgaggtatattaaggaaatattaagtatttaactcttaaaaataacttcatcagtgttcctctgaatatttaactatcacaaatgatgttctaggcaatactccacacactttatgagcattaagataatcaatattcataagagccctctgaagtatgacccattatttctttccatttatagaaagaagactgaggttctgagaattttaataacttgtcaaaggccaactgctaataagtaataatctgttcgttatattctctctggaagaaagaagcaattccctgaggaaatgagacagtgggcaaataagtttggataaggaacctgtttaaaaattttcaaaaaagggagtgagggagcctgcccatggaatcgccataggctatgagcatacagggagatcatcccatgctatgagcatacagggagagcatcccatgccatgagcatgtggggtgagcatctcatgctatgagcatcccatgctatgagcatagggggtgagcttcccatgccatgaacacagggggtgagcatcccatgccatgaacatagggggtgagcatcccatgccatgaacataggtggtgagcatcccatgccacgaacatagggggtgagcatcccacactatgagaatatggggaggtcatcccatgctatgagcacaggcggtgagcatcccaggctataatccaatgctatgagcataggcggtgagcatcccatgccatgagcatcccacgctatgagcatacggggagagtatcctgtgccatgagcatagggggtgagcatcccatgctatgagcatatggggagagcatcccatgctatgagcatagggggagagcatctcatgctatgagcatagagggtgagcatcccatgccatgagcatacagggagagcataccacgcaatgagaatacagggagagtgtcccatgccatgagcatagggggtgagcatcccatgctatgagaatacaaggagagcatcccactctatgagaatacagggagagtatcccatgccatgggcatacagggaaagcatcccacgctatgagaatacagggacagtatcccatgccatgagcatacagggagagcatcccacgctatgagaatacagggagagtatcccgtgccatgaacatagggtgtgagcatcccaagatatgagcataaagggtgagcatcccgtgctatgagaatacggggtgagcatcccaggctatgaacatagagggtgagcatcccacactatgagaatatggggtgagcatcccaggctataagcatagagggtgagcatcccacactatgagaatatggggtgagcatcccaggctataagcatagagggtgagcatcccacactatgagaatacggggtgagcatcccatgctatgagcatacggggtgagcatctcacgctatgagcatggaattttctattccatgaaatagaacgtaagacctaaaaccacaaaaaccctagaagaaaacctaggcagtaccattcaggacataggcacgggcaaagacttcatgactaaaacaccaaaaacaatggcaacaaaagccgaaattaacaaatgggatgtaattaaactaaagagcttctgcccagcaaaagaaactatcatcagagtgaacaggaaacctacagaacgggagaaaatttttgcaatctctctatctgacaaagggctaataatccagaatctacacagaggaaaagattctttaaatgctaatataaaaaagaagatactaaaataaaaacgtagacatactgaatattaaattctagctatgttaaatgtttatgtctaccaataaaagaatctggcaacatttactttattaagaaaatgggactcactttatttttctagacagatcattgttagggtgattttcccttaagaagacaccaaaactgccaataaaatatatccatacatttttctctctgtaaagaaaagtgaaggctaactaaactttcaacaaaagactctatgtttttctcaaaacctatatattttccgccttccaaagagtatatcttttccaaaaagacgctgaaagtttgtgttaatttattcttttcactgaaaaaataattgtacatatatttttaaaaacattaagaagatgaagatgatgaggtcatttattgttgttaaactttaatggtgtctagataaggggcttggcactttttttcttattgggctgttgttttttccgttcctgttgggtcagtagcagccactaaatgacatgatgctcaatcagaccttttttttttttttttttccaaatttgaaagaaaaaaagcaaacctcacctcagcaccaaatgaggcagttcgtgctggttttggaaaaggaattagctccagagagaaaaataacaaactcagtcctgaggtctttcctatatattgaaaaggccagtgtggaaaggaaatgcagaaaaacaaacagaaggtgcacgagtttctttatcatacctggagaaggatatgttcaaatccacacagccgtgtcctggcgccaggcctttgcttttctttttctttctttttctttaaaatggcacccactgctctataaaatgatctattgggacttcaaagctgtggcaattgcatgtggcacaggatgtacacaattaattatgtgatgcttaaatgacagggtataggaaaaataagagagaagaagaaaaagttttttttttttttaaaaaaaaagcaaaaaaaaaaaaaaaaaaaaaatccaaagtaaactgaaagacctggttgtctgcctgccaaaaaccagtagcagataaggcctccagttgctgtggaaactcaggcctccaggagccagaatccaatttcagaaaccacaaaatcaacataaacgtgtgcaaaaataaaaaggtttgtttggcaagtaataaggagaaggctaccaatgtataaaacacatgaaccaaggtgacctcagccaactgaagctataatgacgatgatgtccacagcagatttggcacctctgaaacgagcggtaacaagacacagtccacgccgctttctgttatcaggtaattgctacctttttgaaatattaaccgtccaccacttcttcccctgcctcacctcagaaaacataacaacacccttcatgaaagcaatgttagagatcttgattttaacccgagaggccagaaaacagacagctcgacttttcacttgttccttagatcatgaattacacgctgtatcatccaggaaaaagaaaaataaagaaaaatagattctatatacagacttctttatcccttctgcaatctgcaagaaacaattgccttttaaagtaagaagcagagttcacatataaactattaataattataaacctttaggttattctgaactctttatttaatttacttctttagaataaagaagtatcatctaaaataaatgtcctttgatgagtgaacaatttttaattcattcttatattctcagaaattatctttccttcttttcctttaaagaataaatgtgctcttatacttagttcatcaataggttgataaatcatttgcttggataagaccaacctgtatttcatctaacactaaatgtagaggattttcaatataaattccaggaaatctacaagtttgggatcatagagaaaatgcactagtatcttgtttctgagaaagtgacctaaaactctttttcaggaagtaaaatttaaaaataaattggaattccaaacagataaatatgtaaagaaagaaaccaaaaccagcccatagaaatgtcaaatatataacaattcaccatagaaatatctccatccttatttctctctcattcctgtttttgctcctcaaatggaggatgaaatgtaaaatatataattccacttcctgggaatagactgtattgtatatcatttgcatcgaaaatgcctcattcttgccgcagagattctgctaaatgcctatcacatcacttctgtcatctcttgggccaacagctaagccctgtctctttgtaactgcattctgttcaatgcagtataggcagaagagatgaacaccacgttcaagactgctagtctatattttgagaaataaaagacaggtcagccacagtgatgagattttttcttttttcttttttcctggaaactgtaaatggcagagaaaactcagccttaagcaattctgcattgtgctgtcttcggacatacaagtatctgttcttatgcgcaaggtttgctcaatataaaattctctcaggagtggagaaaaaatatgtgatcagaagcttgagaacctgatgatttggagagtcagaggcagttgatagcacttatttttgttttcacaaccacttacagcattataaaaaaggaaacctgatattgaagaagtgttcatttgactcagtttataggtatattatgccacataattttctcactggaagttgcaactttgatttgtttttgttattaattcacttacaataatatcttcttgttaaacatattaacggtacatttatataaagaaatttgaagaccataaaaacatgtttttgaagaatatttaatgactaaagaaagttttgatatattgtaagtgaaaaaaatcaggatatataatttaaatcttacaataaaatatttgataaagaggttaaaataaatatatacacaaaaagctaaaaacctatttctactcagtggaattataggtgatttttatttcattttttctctatgattttctatcatttcaaattttacatgctaaaatttgccatttgattgttttaatagattaatacttatgtgttaagataattcaggcaatcaaatctccattcaagataagtttaaggcaacctatagtattaagataggtgtaaataacatgaaaaaagatgaaaagtgaatgaaatgaagttctacaataataatagtcttaccatttgttgggtgctcatttgagtatcgtacatatattaacttatttaatcctcataccatgcaatgaagttgccatattactccccttttataaacaaggaaactgaggcacagaagggttgactaacttgcctaagagctcttagctagttactggagaagctgggttttgaacccaggcagtctggctccaaaggctgcatttttaggcactgcactgtagggacggttgtcaagaaataaaactagaatttgcccttggtttactctctctcaatgtaaacagggagtgattggttatataggtttatccgtctgttataaaaataaacataaaaatttatctggataaacaggtgtttttcggtgtctaaacttgaagaggaactgattgttgaagttaatgagtgcaagaatgagcaagattttcagctgtattattactgaatatacagagaagaaatccaatttagaaaacaaaagggagcaatgaatcattcctagaactcaagaagcatatggcttttcagggaaatcttcaactttttatgggtaaaggtggatagagacttgtttccttactaagaataggggacgttgatggctacagccctagccattttcccattcttctcttaatgatcaaaaactactgccaaggtcagagtggagcagaggaacagagttaaacaaaatctctttggcaagatcatttcttccaaagggacttgattaatctaataatgttgcacattaaatcaatttgcactaagaaaatgaaagccacacatggtgatatatagcctatgggagctccccaaatgaaccccaagccccagccaatgttttagtctcttgctacttcttttattttacacagaaaattaaattttagcagttgagttctattttcgtttagaatgtctattaaaagtctggctgtaatatttatgaataccaaaacaaggccaccaggacacgtgtctactaaaagcaagtctcagttacacatctgctaagcagttcctcagacattaataataataataatttcaaaatcatgatgtaaaacaaactgtaagagcgaggttcaaattggaagagcaaatacaacagagaatacaatttttaaaaatattacaatacaattcctttaagtgctttagaatactttttcttcctattacttcgatcttggagttagagggtgaagaattaagttcaatgatgttttcatcatcagattttattataaaaccttcaggaagatatttttttaaaaaagctcgaatacttaattgagagtatattaaagtctaaactgtgagcaagtaaagaatcttttatcaccacagaatgactcttctggccaaatattctctgctggattcctagtttttatttgtttgcttttagtatatataagaattttcttatagatcaacttgggatggagagggtagaaagagatagaatggtttactcttggattgttagtggtcaatgccaagtagggacaaataatgataaaagacataaaagataaaccatctcatgaataataaagtgagctaatggagaaaaaggatttaatttgaaaaaaaaagacttaattttccatactattttccagtaatacattactgtctgcaattcacccattagtcaaagttaaaactgaagaacattgttgacacttaaaaattcaaatatgttgacacagacgaattaatcaggaacttctcttaaaattcaccacagatattcaggtccagctttgtctgtgaggtgatctttgtcttttttccctagataaatttcgtaaaagcgtaacatctgctgagcactaactttcaagactgcaacatctgtactgttaaatgtttattttgttcccccaaacccaaagcaatggaaaggagaaataacagagtaggagagagaaggagaagaaatggaaaaaacagtctttcttcacactttccgaagtcttaaaatatcgcccaacctaacattctcacagtagcaaacctttcgtcttcccttcttgccaccctttatgctaaccctctgggaaaagggcttcatttattcacccaggactggactctgtcagagatttctgttgttttacacgtttctgggcacaagaaagagcttatgcaaaggctggccctggtattgcagaagtcttgttggtttttgccaacaaactgactttttcctaaaactttttattttaccgctttcttatataaaggaagaaagattctcatttaaactacagacaaaggggaaaaaatgaggagagacagtggtgatatggagcaagctgatgaaaaaaaatgcatcattttctgtctgttgagttcttaatgggttttgctcttcaattgagttaatttggtagcattttctgtgtcactggattggcttaatcagaggggatttaagtgcaatagcatggtgtgcttcacagagtgagagtgtgtgtgtgtgtgtgtgtgcgtgcgtgtgtgtgtgtgtgtgtgcgtgtgtgtgtgtgtgtgtgtgtgcctgtaagcacatacggtacatggtgatttttatactgtagaaaactgctgagctaaaaatctttctgcaaggaaaagagggcatggttttcttctagttaactttcaaaggaactgctctgtcatctggacccagagttgaggtgtcccaccaagactttgcaggacagacctgcctgggtccatttctcactctgcctccagaatggcacaatgccaaatactctcttggtaatcacatgcactctgcagctttcagttttctctatcatttacctccacagaccttttgaagtgttgtttttctggcttcgctcacttttctgccattctccagaatgtctttgtgtgatacttgtactataaaagaatgccagattagaaaatcaaaatattggaaccaaagttataaatctggacaccacagagagccagagtataagggtatttttttctaatgttttgttgccactaaggcatattatttcttaaaacagaagtacaactcttgaagattataatgtaattcagccttccagtgttctcttttcctatgatgaggaaagatctagaatatacattagacccaacaacctcgatttttacatatttttttaatttttatggatacaaaatagttgcacgtatttatacggtacatgcgatattttgatatcagcatacaaattttaattatcaaatcaagtaattggggtacccattgccttaaatatttatcacttcttcatattgggaatgcgaagttttctcttctagctatttttgtttttagacggagtcttgccctgtcgcccaggctgcagtgcagtggcatgatcttggctcattacaacctccacctcccaggttcaagcaattttcctgtctcagcctcccgagtagctgggactagaggcacatgccaccacgcccagctaatttttgtatttttagtagagatggggtttcaccatgtttatcaggctggtgtcaaactcctgacctcaggcgatcctcccaccttggcctcccaaagtgctgggattacaggtgtgagccactgcacctggccaatacaaactacttgaatttgaacttggctgactttcatatttaatagcctcatggtgggtctccaataacaggataattgaattaaggaacacagtccatctgagtggatatggtaggcttcaccacagtgccttttggaagggaccaacttttggaaggggttgctgtggctcaagcctgtaatcccagcactttgggaggccaaggtgggcagatcacgaggtcaggagatcgagaccatcctggctaacacagtgaaaccccatctctactaaaaatacaaaaaaattagctgggtgtggtggcgggcacctgtaatcccagctactcgggaggcagagacaggagaatagcgtgaacccgggaggcggagcttgcagtgagctgagatcacgccactgcactccagcctggatgacagagcgaggactctgcctcaaaaaaaaaaaaaaaattattataatggacaacgaatcattctacgtatttatagggtacatgccataatcaaatcagagaaattggagtatccatcacctcaagtatttatcatttctttgggttaggaacatcccaattccatccttttagttatttaaaaatacagaataaattattattaactatagacaccctattgtgttactgaactgattttctgagtttggtatatgaaagttttaaaccaagacaatccctatgagttgataaaaaggatagaagacacagattgccttggtagaaaggagtatggtgggcaccaatcaagagtttcagaaccttgaatgatgagatgaggtttcaggaataggtctcaggccaaaggtggaaggcaataaaagccagaaaccaggtacaaagtccagttaaacacatgggtcacccattattgagaaaaggtggaaagttgaagcatgatgctttcttaggtttctaaagtttaatgtgctcacagacatatcagatagcattcctccagctgcatccaacagtgctctcttttattggttctagttctggataaaatttagttacctttggcagatctagcattgctgcaataggaaggaaaggagagaggaccagaaaagattccaagtgcaaaatgtgcccttaggtgtaggcccaaggtggctatgaatcctatccctgaagtcatggaaattactaagatagtcccctccttttattaaaaaaaaagataatttcttcaaacaactccaaactgtatacacattttataatgatgatttatttcaaaatcttaaatactgactgaatattcaagtagggaattaagtcctatctttgacattttctttatgtgttatctttggtgatgctaagtgttcgatttcaatttggccagtttcaataaactttctagtcaattttgggacacatgtgattcaaagttgtactttaaaatagtaaaccttgtaggcaggtataaaacatttaaccatctaatttacttaatcctattattgttatttcatgtggttagtgttcagtaacacttagaacattttttaaaaatgaattgattatacaattatttcatatattatgtacgtgagcccagaagttctcatcattaagtatattagatgtctgtgattactatactttatgagaaagatatctgttattaatctgtctagaaacctttagtctctagatcaccattgacaaagatagggaatatatttttgtaaaactctaatgaaatggtgtgaatttcctgaactaagaggagcacttacattctcagtgttggtttccaacagatttccatttattagcctatttagtatgttattcataatatgatctctatatgactcagtttttaatcactacaactatcaatgacaacttatgaaaggactgagaaattccatgattccaaaaagagggagaagagagaaaaattataactgcctccaatttcaatccaaagtttatatgtgaaaagtaataactaactcttcatcctgaataaagcagaaattactgtaagtaacaaacagaagaccttgagtaattgcagaaaattatgttagtttagatgacatgacaaaatcttacccaaggcaatattgtacaatccctgttttttcagagaataatgtaaaaaaggtccatgaccagttgaggtaagttaaccgagggcttactagcctacaggaaaatgaactggaagccctgtgaggtcttttatgaccctgtgagtctgtgaaatgttgtcgttaattccctgctatcacctcaaacacataactaaatgtattcgctggctagattccctctttctgtcaatggtaccagcattcttccggccacccaggctcaaaattttgtagttatttttcattctcttggcttcctacagcttaacccagtcacttgctaactctattcaatccttttatatatctttcccatccaagcctatcttgcttgtcctttgcaagaccctaattcaaacccattatcctttcatgcatgttcatttgcaggatccttgtaactggactctttttccatccaagtggccctgcattccaccagtagatcaaccttctttaagcatcattttgatcattgttatttgtcttcagagtctctgccttgcgtttatccatgtgaaacaagctggtggtgagttcaacaaccaaagggtcatgtgattaaatacattttgaaatgactgcctgccctagcctcttaaaaaaattcacaatgctcattagcacaacaatgacttgaataaatctcccaatagaaaaatctgcttcattttacttaacacactcatgtctcaaattagttgaatacgaaaacctgtttttttttttaatttatgtaaacattattaacatttctcagattgaatattttaaataacatacatactttgggaaacattcatgagaatcatagcattcgcactccttagcctgacacatttcttcataatcacgtccttgctgtccagtcttatattccattacttctccgtggacatggtcatccccaggaaggcccgtccacttttcagtctattctctctgaccactcttactatccctccattaacttttttttgaatgaactctcactctgtcacaggctggagtggatcgtgcagtggcacaatctcccgagtagctgggattacaggggcccaccaccatgcctggctatttttttgtatttttagtagagacagggtttcaccatgttggtcaggctggtctgaaactcctgacctcaggtgatctgcccgcctcagcttcccaagagctgagccactgtgccagtccaataacttttattcattaattttaagaaaatatcatatttcatccttttagaatcaatttaatgccaactcttttttaaacatttcaatggttttgggggtacaggtggtttttgtttacatgggtaagttatttagcagtgatctctgagaatttagtgcacctgtcatgcaagcaatgtacactgtacccaatatgtagtcttctattcctcaatcccctcccaaccttcccccctcccctgagtccccgaagttgaatatatcattcttattcctttgcatctttatagcttagctcctacttataagtgagaacatacaatacttagttttccattcctgagttacttcgcttagaataatggcccccagctccatccaagttgctgcaaaagatattatttcattcttgttgatggctgagtagtattctatggtgtatatataccacattttcttgatccacttagttgttgggcatacaggttggttccatatctttgcaattgtgaactgtgctgctatgaatatgcacgtacatgggtctttttcatataatgccttcttttcctttgggtagacacccagtagtgggatttctggattgaatggtagttttaattttagttttttaaggaatgtccatactgtttttcttagtggttttactaatttgcctttccaccaattgccaactcttttatgaagactttgtaaagctccagcttcaaacggtggatcagtctcctatgacatgtggggtgcagtagttataacactagtagagtaattccaaatccactcaactcaatgtagcaacagtctattaagtatcttctggttgcaaggcacttatgataaggaaataaattctaggatgtgccacactaaattgttcatggggtatttgtagaattgcagctattgctataatggtaatatacaaagtactagagaaacctagtttattctgtttgggaattagggatggtggctcacataaaactacagaaagggggtctctgagccagccttgaatttaattaacatattaaacaatggttaccattagacaattcattacggttaaatgatatccccgtgctgaactcacaagctatattccctgactgtgcttcatgaggcaggggactctcagtcaccatcattattaattaagtttcctgatcaatttgagaactattattaaatatctcttcaattactcattcttcaggctgtataaacccagttcattttagcttttctcagaggtctgattttctaagcctttaatcatcattttgtttctttgaactccctccgaagtttccatgcccttctttacttacttctacaactagttactatgctggataaacagcagaggaatgtcatggacaaccataccaagtggtgaggtttgattgagttaagcacccaactcacaaatacttattcagagtatcccaaccctgtagcacaaaacttggctgtggctcaaaagtgttttaatggcctgttcatacagcattacatgagggtgacgatttttaaaaattcttctgggcataatattaaactacagaaacccccaaataagtacgtccaccacagcaccaggtattttaaagctatttatgatttccactatttatttgcttaagtaaatatagtaaaaatagttaagatacatatatgtatgtgtgtatatatacactatactaaatacatatttaatatctagttatataaaattaaacaaggcatgtaatcattattttttcacaggggtttaagttgtttctttattgttattcaacaatggcatgtttcttactaatcaacagagaaggaaagtaaaatgcacccttaattatagatgagcttccctaaattaaacaaaatttaaaatcgtaaatttgtagcacaattggcaaagagagagagaaaaaaagagaattagcccaagagcagatttcttcaaagcaaccatagaggtcagaaatcagtggaatcttcaaaataaacggattgagaaagtacccatcagactggaatactccactaaattaatccatctttaagaaacaaggataaaataataatatttgcagataggaaaacaaattttccactaatagactaaattaaaaatatacttcaaggagaagaaaaatatttctaggaggaaattcaagatgtaaaaacaaatatatattttttaaaaaggtgaacatgtattaaatctaaacaaacagtatctggtttgaggcaataatactaatgctaccatttataaaaataagtaatttctaaagggtggtagtaaaacacaggaaattgatagcatgtaaattggaggatatcaggtccttacaaggttgtcacattgttgtatgaattcaagatcaatcaaaaataataattataaatggaaataatgcataaatataaatacaatggaaattttaaaaagaatatgcaaccaacaactctttttcaataaatttgagaattagataaaatggataattttgcaaatattggtacttaaggagactatctggaaaagccttataattagactttaaaattggtacatattaaaatattctcacaaagaaaataccaagaaaacagtgttttgtaaattttcccaaaatttcaagtagaagattataacactcttactcaaatcttccaaagaacagcctaaatctcaactcactccacaaatcccatataatctcgatattaaagccatgtaagaagagtaaaggaaggagaaaagaaaggaaaaagttatttattcatgaacatggatgcaaaaattcaaagaaagtactagccagctggatctgacgttgcataacagagatcacactaccatcaaactagatttaatctagtaatggaaagggttgtttaacatcttgaaatttgtaaattcacctaactgtacaatacgaattaaaagtacctgagacagagagaggctaaggcagctgccccgagacttggatctactgagtggccgaagtgggatttacatgggaaagataaaatagtaactgtctcacacgagaaagacgaaaattacatgaaataaattacataagggatactggccgatatatgcaaaataatctacttattttagaataaaaaacagtattatttaaactagtctatattttcccctgttctcctgtcttcatccttcaccaaacctcttgggtttgtagcattacaggtatggaaaaaggaagaatattaattataggattggcctaaaataagtgatctatctatctactagactctagacaatgtagaacgtctttaactctgtttgttgggctttgagaggggcaggacaaaaagggaaagcggaaatttggaagctattgtcaagtgacaaggtatatcaaacatgcttaattctgatacacatcatgatctaaaagactcaaacagaagggtctttcaaataacttgagctcgatattatatttgaatggttccagatcacagtaatggaaccggaatatgttttgaaccctgattttaaatgtgtgttacctttttactgctttgtaagtaaatcatagaatcacttttttagtatcatttcacttttatgagtattttttaaaaacccctctgctaatgcctggaatctctccattcagagttagagtcataatcagatttggccagttgataccaaggcaactgcctgtgtgttttcttttgactgtatcacgggacacagaacacagcttaagaaacagtcaggaaaatgaggcctgtttttttgaggggataattaagaaagacaaagtcaattaacatctgattcctcacaggtttctccaagcaaattgttccaattacccaaaaccagtgagcaaattgtgaggtcatttaaaaggagcagtcactactcccttgacactgccctgccactgtgctgtcagattttctgtgtatagaccaattaaagagcaaattgaaacatgcaaattttggtgcaagaatgttcccgtatatagtagcaatgtatttatgaacctagaactcctattttatttccagtacatttcaaatgtaagtttatctgtatcttacatttttaagtgtattgctttcatttaaatacaaaaataaatgcaacatctttgcaaagtgtgttcagtatatatgttgtcacagccagaatattttacaacagtgtggaataaaagatagactccactgttactgtttatagtctgtaataggcaacataaaaacaaagtccacattagttatgtagacggcatacttttatgagcctgttaaactttgttttcgcaggctatttagtcatttcaaaataaagcctaaacaaactacccatatgtttactctgtttgtcaccaagaattaagatttgatctcattatataggtggtcgttaatgtagagctgcagaaatttctttatcatgtttattgaagaaattacaaagaaccaaaatggaatgggccagcagataagataggatgtaatgagattctctctctctctctctttttttttttttttaatgagatggaatatcgctctgtctcccaggctggagtgcagtggcgtgatcttggctcagtgcctcttgggttcaagtgaatctcctgtctcagccttccgagattctttcttaaagtgaacgtattttcaatgccatcctatgagctttccgaaagaatcggtaatattgttgtacttaggataaattgcatctccacccggaaaggggaaggagttataactttgattgattccttgatttcaaatttttgcacatgcaagattattcaaatgacccttgatgtccatgatttttagaaggatacaaacaaaacaggtaatgtttggccagaatggtgaataacttaaagggaaaattacttggaaaataaattcgaagtcatagaattgtttaaggttgagaaaacaagccagttagcctcaaatacttgaaacaataacgtgtgatggggatcagtcatattccatggatctctcaggatatgtagggatcttctctcatattaatgtatgaaaatgtcttatctgattactgtacattcccatttgtaactttttattaatttatatgctatgcttttcttccaagtatgacttttttttttatttttattttgatggagtctcgctctgttgcccaggctggagtgccgtggtatgacttctgctcactgcaacctctgcctcccaggttcaagcgattctcctgcctcagcctcctgagtagctgggactagagatgcacaccgccacgcccagtttttttgtattttagaagagacgggatttcaccgtgttgcccaggctggtcgtgaactcctgagctcaggcaatccgcctgtcttggcctcccaaagtgctgggattacaggagtgagccaccgcgcccagccccaagtatgacatttttaaaggaattaaatgtaatgttattacatgttgagtaaaaattaatttatatatattgtgtgtcttctctgcacaagacattacactggatgatgggcatccattcaccttatttcatgcttacaagaattctatgcagtgaggattgttatttgtattgtgggcattagagaaacaaggttgagaatgtttaaataatttgtccaaagtcatgttactattagaaccaatatttaaactagttttctgttgacagaactttttcatttttcttatactttacagtaccagtcaatacttaaagtattttttccaaaacttatttgtttagtaaatatttattaagcatctatgatataccacatactgttctcaatgtgggcaatataaaaataaaataaaatcagatagagagcaaacaatcaactagtaagtccattaaataaaggccttgaaagtgatacattgtatggaaaaaatagaggatggtaagaaaggcctggaggtttgggtggaagaacttacaatttcaaatagtgtggtcaagggagacttccttgacaagatgcagaaatgaaggaagtgggttaactatgtggatatccagaagtacagtatcccagtcagacggggaacaacgcattgagactaaaggtgatggtgggccaagcatttagaagaaacagccacggccaggtgcggtggctcacgcctgtaatcccagcactttgggaggctgaggcgggcggatcgcaaggtcaggtgatcaagaccatcctggccaacatggtgaaacactgtctccactaaaaagacaaaaaaaaaaaaaaaaaattagctgggcacggtggtgtgtgcctgtaatcccagctacttgggaggctgaggcacaagaatcgcttgaacccaggaggtgaaggttgcagtgagccgagatcgtgccactgcgctccagcctggtgacagagcaagactccatctcaaaaagaaagaaagaaagaaacaaacaaacaaaaaacagctgcaagaccaatatggtcaaataaagcaaaacaaaacttttgaattttacaatagaaatttatgtgatcgaactatgtatgacctataaaaaaattcactttatacaggatgatattttatccattcatgaatgggcatttcttgtaaattcagtcaatattcacacattcagcaaatgttcattgagcacgtactatgagctaccattctgggttatgggatacattagtgaaaacaaatgccaaagatttacatcctcatgaaaataaccaatgaccatgaacaagcaaggtatatcccaataatttaaactagacttatagtaaaaacttagtatcacacgtcatatgaataagtaaaaagaaaaatctctctatatatgtctaaggtaattaatactttgaaaaacctacttgacatatggaataataaaatagattcatatattacaaatacatacatacatatatcacacatatgagacatacacacattattattttttccttaagataattccctgaagtctatttgtcttgggtcaaagggcacatatactcttttgagctctaaacacaaattttccaattttccttcagaaagtttatgccacgttcattaggtttggagactggagattagagggaaaaatgttcttttataggaaaaacttgccttcactatttaattcataaaacatgtaagctggatgtggggatgggagtaaaatgcagtttaaacaattgatataatcagctttaagctgttcttctaaaagatgatttataatctcaaactatattgagcaatgtcagaataattattcaactaataaaaataaacaattacctggaacagctttggtttcaaattgcctgaatgcttgtggtaatttttctccttagaatctttttcatttgttctgatgtttaaataatgatcagatgcacaactaggaaggaaattggaaaactattacctcaagcaaagcctaacaagagggtgtcacaatttccatcaaaccttcgatttgacttagacacacaatcatcctgtttaaaatgcacagtgacaggggaatagactgaatgaccatattgatcctaggtagccaaaaagattataaaattcaatgacttgttcccttgtactgaacagagctatcaacaaatgtccactctagctaacagcgaaccccttctgcctgcagggtaataaatgaataggacactaattcaatgtgtgattgaccaagagcaaagcaacagaggtacctgtctgtgattttcatcattgctgggctgagtcagccgtcactggttttggcttgaggaccacatttcactttaatatttctgaatcagattggtgcttcctatcggttctgccttaatgctccagctatcatctcaatagcttatataaagttaattaaggctatccgaaatgcagcctttccaggactgtatctcttgagcctccatcaaaactgccttgtcataaagtagaagaaactagcatgttaataagaagaagagaaatctgtccaacttctaatagtcttatgattcaccctccaatggctcagaggcctttctggacaacagtgattgccatctggtttctttggggatgataaattcagcaataaacatggctttggtcctctgtccctgtaaacccaagacacaaatattgtgagtcagatgttcccagccaacaacacaacggctcctgggctcaagtgctcatttgacacagcccatgccacccaacttcaattttgcctgggctacatttcttttggaggcactacagatttttttttttaacacacacacacgcacgcacacacacacaccattttttttcaaggaggcaggggcatccagccaaataaactacgttaagcagtgggttccattttaggtgttgacagtgtataataaatccaggcctacctaacatttacaggaacgttataaaatgagtgaaatggcatgagctggttgccaggccaaccagacaaacacaataaacaggcagcagtgacaggagtaagttacaccatctctccggtctgaaatatatcactttacattagcctttgaccactttgaaagctctttgttttatatttttcaaaatgctcttttacagcatagattaccattaaatcttttcagatgaggaagtttctttttttccccaaacttgcatagctctagaaagtgaacatttatttttattttaaccctaattaaaaaataaattcaagtcttaggaacaatgttaaggctcaaatcctgaaggtcccttctggcagattaaaatgaaaaaaaaatctctagactagaaagaaaataaacaataacagtagttagtacacttagttggtttaaaatgttctgttaaaatagcaacattttgcagtgctatttaactctttaaaagtgagtctgaattcttaagtaccttttcctctaatagagaatacattttaatataagcttagagttatagaacatcatagcaaaagcatcttagaaatctttcagcacaatttccctacttgacatagaataaaacaaaaatagatgggttagactgagttttttaattactaaagataatgacatcttatttctgttatttacctataaaagtatttatttttattcctttagtcaatattcctgtaagtaaaagatgctctattgcactttgtaccttgggcaacaaagtaaagtagaataatttagaattgtccatataaaatgaaataaaactactatatttgcaaaagatatatagatacctttaatacccagtttaatcaaacttgtttgacccatgcaaaatatgagattattaactattcttccaaaagtcatactgtgaatagggtgactgacgatcagtctgcccaaaacatttcaagttttagccctgaaagtcccatgtttctgaaaaccctcagccctgggcaaacagggacaattacttatctatttgtgaaggtaatttactttattctcattgttttataaaatatttcataaaagtgtgtttgtaaattattctgaggaaaattttgccattacttcacttgtttataatcaatagactccacatatttgaaatctattttctccagtgggtgtggtgtctttagtataaaagacttagaatatggttaactcatgcatcatgttcaagtttttaaattgcagctatatcactgaaaaatatttcatggctgatagaaaaagttatcccagtttcccattgactgattgatcgtttctctacttgtcctaccaggactttgctttaaggaaaacaatgtaggatgttaaaaaaaatagagaatgagcaaaggacaaggttagaggaagccttctgccagaacgtggttctaacatagcatacattcgcaattcttcttaaaaatgataccaggcatctccaaaattgattgatattttactgttaattggcacagattttactatattgagctaagaaaaggcattcttctccctttctatgagcagaattgtatgtcaactctacagatacttctttaataagttttctaattctatatttttgacatcttatatgtctacctgtagcttgacatcctaatcaattacagttggagaaaattaagattttctgataaaagtatttctgataaagaataaacacatataattatcagccacagttctttactccatgttgttcccacaccctttgccatgtaactttgcaatttctttctttaagtaggtgacgtctatagattctatttgctcactctgaatccgtgacatgtttcagtcaatagaatgctattgaagtgatggttcactagttctgagcccaggccacaagaggtcacgtgcacttctactttttctacctttgccataaaaacatgcctggctctcctgctagagattgagcaaacaggcccagtagctatcttagccctggctgacagtcacttaactgccagatatgaaagtgatcccatctgaggcaagggatccagccaggtgagtccagcccaactaaaccatcaactccaagactcacgattttgaaaattcttatcttcttttgccacacagatttgatatgatttgctatgtagtattgctgtgacaatagataactggtataaaactgaaagtaaagtgccttcataggcggctgctataaaaatatacactctgtaaagagttgtaaagaggtttttgtgtcaacaccttctaataatcttagggtttgattgcaattttactgaagtccatactccaagccacctaatgctcacatgcttctccctagctgcttggtgaccctgcttcaggtacttatacctcataatgtactcaagcatggccattatgtccacaaaataaagatggaacatactgccttagtggtcatattgcattagtgcatggcagtagttagcctcttgatttaaataatgcacggagcctatttgaggaggtccatggtatatttatatttcagttctaaaatatcccaactggctaccacagctagagctaattaatcaactggttagttaatatgttattgctagagctgcatctatgcccagcacgatagctatgttttagggatactgataggtttaaccatgcacactggagaactactgcaaaaaggtatcctgtgcatactttagcaaatttaatttctaccacactattgctaactggcaactgtctctattgatgttattccatatacaggattcagtgaatagagttaaaatttaaaacttaaattttctaactttgattatggtcagaagtctagcataataagtggttattaaaggaataaaataattaaggaaaaatgtaaagaaacaattctatgtcctataagagacataacttgctttaataactaggcatgatgaaaaaatgtagtaataaaacatagaaataatgttagaaataaagtgttagaagataagtataagagaaaacatttttcgtttcaataaggcccaagagaacccttacaatctacaaatagagattctccttggaccacaaaaggcaagactgttaatctttctgtaactaccttgacatcattcttaccatatcttatggccatttccactacatagcttccaactaaaaacaaaggaacaaacaaaaacactgtgtaaaacaggtacagatattctattgaacaaccatggttattgtcctgacatctacctgcagaaaataatcaatcaccaaagggaatcgaaaaatgataagaaggacaatattgaatgttacagactgtcctgaaatataggaaaccttatttccttatccccaagtttaacagtacttcacttaaaaggtaaaaaaaaaaaaaaaaaaaaaaaaaaaaaggcatactagtctaaaatgtctcagctacagaaatttctaaatgatccatcttggagtagctgtccacagctgaataaaattgccttagtgcatgaatcactcttaggttttattcaggttcattactatgtgttatttctctcggctacccttctcaatccttgctcaccatgctatttggaaatctctaaaggaagggtggggtgaatcccatgactcctgctctcttgccatttttagctgcctgaaacctttcctggctgccagaatttatagacttgggctgagtggccttgccaaataacaagcgtctggctcatgaatcccgaggtggactcttattaaatggaaacgtgtccactccaccatatgaaagcaaagaaggggcttgaaatgtcaatgtgtgaaaagtcaaggttaatggagtgcaaggtttttacaagagaaccgccaccctgcaatgactaattaaaccgagtgaggtccagatggcaagcatctttaaagatgccaattatagattcaaatgtttttgtgtgacactgttttcctagaaagattaagtagtaatgacgtcttgctttcagtgtgagatatcactttattccatcagtgatctggccaatacctggccttggctgcacgtatttacacaattgatgctaccttcataatatgaatgggcgtagagcagacacttaagttaaattttaacttaattaaaatttaagctatctgtagccaacctagaaaaagtgagtggatctctggtcaaaaatgaaattttctgtatttgtattaccacactccggcatgattacctgggctcatttttgaacaatcatttggaaaaatcaattttgaacaatcatttgaaaaaatacttaccttatgtccactgaagtcttgtaagttctaccatcatagccacctcctcagggaaatgtcctgaaatgattcaaggacacaaaagatgagaaggaaataaaacttccaaaaaatatgcaaccaagctgaataagggcgaaagacttaaacctgttagggacaggggcaaatttgaatgaggtgaaccaaaattcttccactttgggatagagaaaagtcaaattaatcattttcctcacctactgagtctcatatttagataatttgcgtgggggtatgagatggagtctcactctgttgcccaggctggagtgcagtggcatgatctctgctcactgcaacctccacctcctgggttcaaatgattctcttgcctcaacctcccaagcagctgggatttcaggcacccaccaccagatctggaaaatttttatatttttagtagagacagggtttcaccatgttaaccaggctggtcttgaactcctgacctcaagtgatctgcttgcctcggcctcccaaagtgctgggattacaggcatgagccaccgtgcccagcctagataataatttttagcctaatatttcactctacagtcctgcacaagatgattctgaagatgcttttaaagtattctgtgttcaaaacaccgtaataaattctgtatgaaactgcatgtaaagcgtctctttaccacagatgtctcaggttctctaccttactatggtgaactctgagttttgagggagggatgaaatattgtatacctgcacattaacaaacacacacacacacacacacacacacacacacacacacacacagagagagagagagagagagaaagagggttttcagactttgtttttagatttaacattttttaataaatgtagattgagtacaatactgaataagtaaggttaatgagaagaagaaagatgacaaaagtctgtcatttaggagcattaatctggcaagggaatcaggatattgtagacaaaattggtagagcaatgaaattagcattttcttctcactatcacccttacacaagatgttaaaaaaacagagtggggaaggagtcaaaagggagacagagagtcattcaagagcaaacttaatgggtttgtgggactttctgtaagtcaggagcaagaaacaagtcaaagataattctgaggtctctggagaaaaaaatattaataaacattgggataggtgaaatgaagagaaatccactttcgcatttgtggagtttaaagctatgaaaatctttgaagctttgagtgtgagaaaaataacctagaggggccgctcatcttttaaagtatgttggtaaaatggtgactgagtctagcaaaaatcatgcacaattcttgaagagataagatttggtttatgtgttagtcagagttctctagagggacagaactaataggatagatgtatatctaaaggggagtgtattaaggagtattgactcagacgatcacaaggtgaggtcccacaataggtcatccgcaagctgaggaccaaggaagacagcctgagtcccaaaaccccaaaagtagggaagctgacagtgcagccttcagtctgtggttgaaggtccaagagtcccttggaccaagttgaagaacttggagtcaaatgttcaagggcaggaagcatccagcacgggataaaaacggaggccggaaggctaagccagtctagtccttccacgctcctctgcctgcttgtatcctcgcagcactggcagctgattagatggtgcccaccctgactgatgagggtgggtctgcgtttcccagtccgctgactcaaatgttaatcttttttgacaacaccctcacaaacacacccaggaacaatactttgcatccttcagtccaatcaagttgatacaatattaaccatcacagattaaaaggaagaaattgaagccttttcattccaataatagacttttggtgctagactgtgtgataagaaagcagataacagagatgacagctgagaacaagttaaactccaagagcacctaaatgaatcacatctacaggtcaaggtatgtgtaagtgtgagtatgcatgtgtgacgtatagttgccaaagggccagaggaatcttgaaaatgagttgacttttatggactattaatacttttatgacttttattgctattaacatggtactgattttggttaagattactgggtacttgctgaagcccagaagatattttccatagacaattttgattaattatcaaaagaatcttatgcaggtacaactttccctttatgaaatgattttattaaggtataatgtatatacctaaacatttacccattttaaatgtacgacttaatgattttagcaaatttactgcactgtgtacaaccatcagcataatatatggttttagaacattttcatcaccctggtaagatcatgcatgacctttataatcaaggtacatcctcacttccagctccaagcaaccaataacctactttctttctctatacattttcagcacgtactatgttatgcccattttgcatctgagtaaatttgacttcgttgttcacctagttctgaattaaatttcccttattagcaagcagtataggaaacagaatgtctttgaaaatcatgataaaattacaacaacaacaacagcatgaagtatatgattccagaaacctaatgtctacagcatgggagatatttcttgtggtaagttagtgttttccatgttcaaaagaaataaaccaagaactaaaagattgatgtgccagcctacgaagatggatcctatatgacattgagggggaataaaaaggcttggtaccagtaagaaaataagtgaggtttcactgttggctgagcctttagacaccaccagcctggctaggtgagtttgtggaaaactgtctttggtggtctctgggtgaaaccctgataggcaattgcatttcagagacagtcagcatggtcagctagggatttggatttgtcccacagtttgaaaggggggcagaaattgaccacatggaaattggcgttcagagaaattgcatctggaaggcaaactttccaggctgctgaaggcttaaaatgtcaaattgtttgaaaaacaaacaccgtgacataagaggtatatgcaatgaaatcttcaagatgttcccagcagagcagcatacagtagttggctcaatgaacctatactccaacccccaatactggcctaataaccaaaataagaagtagaaatgttaactgtgagatttaagaataggatttgaaaaaccaaccgcacaggctagatttgccctcagctcttatccacacaataattactggatgttctctgttaggctcaatctttttgcaaatgactcagcctcctgcacctggtaagtgtgcattcctaaactctgaaagagtctacatattctatataaattgaagattaagcctcatggataatacaaaaatagggttcaggcagaagtgaagaaatctgttcaaaattaccttgggaagggactattcctcaacgagctgataatccagcctgtaaagtagcaattggacattcaagatacaaatcaagcttgcaagaagaatgagatagcaaatcttcagggaatttaaaaaacacagtcataatcagactgtgtaaagtataaaagtgaatacttattcactcagaagatatttgtggttcactggtaggccacttggagtttctattgtggtttctttattctctctcatccttaaaaaatgtgatgagtgtaataagctttacatccattttcaaggcccagtgcaaaagaagtctacccagttcttatctggcaagtgtcccttctgcttctgaaaatttctttcaccacttaacccattgcctagtgtattagtctattctcacgctgctaaatacaaagaaatatctgagactgggtaatttagaaagaagagaggattaattggctcatggttctgcaggctgtacaggaagtatagtggtttctgcttctggggcatcccaggaaacttacaaacatggcagaaggcaaagggaaagcaggtatcttacatggccggggaaggaggaagagagaggggggaagtgcctcacacttttaaacaatcagatctcatgagaactcactcactcaccgtcataagaacggcactgaggggatggtgctaaaccattcatgaagggtccacccccatgatacaatcaccttctaccaggccccacctctaacataggggattacgattgaacatgggatttgggtggggacacggatctaaaccatatcacttcatgttccattaccttctccagtcacctatgttatcattctggtatcaagcccatcaggcatcaaattgcttttcattttcactctttctcacttttgttttatgtttaataaatgattgttcaaaaccaaagcatgagaaatatgagcatcgacacttatagaacatcatttgtgttaggcatcttagttttttatttttctcattgttgtaaagaaggcaaagagataaagagacgtagtcatagagagaaacttaattggcactactgtaggctcagcatctattttttcctatgctttaaacaataacatctgccagcgtataataagactatcaagaaaaagcattttggaaatacttaaaaaaaacccatgttaatcagtcttccttttcctaaggcaattgttccaattttagtttttttcttaaaaaaaaaaaattttttgtttttaatcacatgggtaaactctgattattgaaggagggaggtagaaagcccagatagagaagagtaaaatttacccatattttcactacctaggataatggaaaaatactcctaacattttggtttatatcctttcagaaacatgtgtatgcacataaacactcaaacacacatgcacacatataggcatttcattagttttcctgcataacacaccatcccaaaattttatggcttaaaataatagcaattatttatttagcttgcttttccataggtcagaaatttaggctggactcacttgagagatttttctactgctatgaagttaggtggcaccatttctggggactgtttagaggtggctggtccataagtgtctcattctccattaggcttgtccagcttcattctcatggtggcagtagcagggttcccaggagaagcaagaaggcaagttccaacgtacaagctcttttcaagcctctgattgtgtccctggtgccaacagtctattggaaaacccattcacttgggcaacccagattcaaggaatagagaaacagattccaatatttgatagaaggacgcacattggaagaatttgtggccagttttgtagtcactcataattctaccaccaggaaatgtgatactataaacattttggttatttttttttcaaaaatactcaaacctatgctaaattaaaatgtgatttaagtgcattcccatatctatgcatgttgctctacctcactgttttaaatagctgcagagtgttgctctatttaactgtactatgatttatttgacatatctccagcaattcaactttaaaacatttccaatttttcactatcaggttgtcataaacatctttgcacattcatctttccaggattatttttatatatatcccctcggctaggttattatcatcaactttccaaacccctcaaaactgcagcctctgttcgcaaagcgacatggagaaaaagacagtggaaaggctagaaagaaagaccagactaaaacgttgactgcttatgacaatttgtcgccaatactaagaaaaattaaatgtgaaaagtaaaattaaatattaaaagaaccacaaaaattatcatgagaacaccatttgcttacaaaactaaattgtaaatgtattctcaacttattcactcttactgtacttaatatcctacttcaaatgtgcaatacaggatcatttttttacttcttctgatagcatcattccaagtggctaggatatttccttcagcaacatcttggtctcttcttcgtattgatagaacagagctgttggattttctgcatatcctgaatcagacgcctcccattcatctctggtccataaccaggctcttctgccttcactgcctttgccgtctaactctggagcacaaatgagatgattccaccaaggttggtttcactggcaatgataatctgggtgtcatggcccagctttcccgccagcttttgggccttctccaattcactaaatacttcctcataattttcttccaattcaagaataagggggaaaactatagcacttgatctgcacctgtgtgttgtgggtacccgataagcaaaacaggggaagaaattaaataaacaccttattatagtcaagttgaactaggtccaagaagatgtctgaaagcttttgtttgccgaaaaccaagctctcaggctaataatggtgagtaggtgtcaaaggtataataagaagtaaagttctttaaaaacaaactgcaaacaccataaaattatattgttttcaacttccctgttcagtggctttgttatgcatgtacattacagcagccagtcatgcccacaaaagacaagagtattccaagcctgtcatgtgtttatatatgacgttcagaattaaggttacataaatgaactttttactcagtcagcataatcaattaggtaaatctgggaaagtaggaaagtgaaaagtttgaaaaatatatttcatttcaccaatttatcttcattgtctaatagttgcatttgcagaaaaaatttattctttcatcttatgtttttttatttttatggctaattttaaggctccaaattcctagtttgtttatctatttttgccttatttttactagagacatgtggcaagacaatgctatcagggagaattgaatttgttcgtttataaaggctttctatatggaaagattaaagtaaaactagaacaaaagacctaaaatccatttttgaactagggctataagattatagaaattatcctcatttgttttgatacagtgaacaagttagtggatacaaataataaaatatttacacaatatagttattatttcttatggaaaatgattgtaaagaccagaaaacaaccttattctttgtgttctcatttaccagcttctcaaaatcttatgtggaatcaaatgaaaagtatcaaagtctccagctggatccttagcatctatggtatctcattttctccacggaaacaaggaagggctccccattcatggagaaataccagtttcattttaagcatgactactgatgtccatggcaagtctgctgactgaaaagaaagtgtttattgattcaacctttccataaccctttactaaagtaaacatgtctgagacaactaagcaaaacatcaaatttcactcaactaccatgtggccttctttacttaaaaaacttggcatgggccactactccagccagggtcccaggagcacagaggacctgccttttaaatggtacaataatatccaccaccaccgattttcactcccatcactatgggcacccatctctactgccttcccaatatctttggttaattactggtgcctaaaatgttagtaatgtcctcattataatacaggttaatatggggcattttcatctcattttaagttgatataaacatcttttcttggaagatgagagaacaagtctgcacagtttcaacacttttgaaaaatcttaccttgttgataattgtgcagtcttgcatttattattacttccagatttgatccaaaataagaatcttagggtggcaatgccataatccctaactgcgcatcatcttcttctatactgaaacctggattttacccaacatggagaaattaataaaataccctcacattctgtgatataactttcataatatatccatcatcaccggagggagaaaatggttaaagacatgtgtatacaagagatacaattctgcatatatttatatttatacttatttattcattcaacaaatatttattggccatctactatgtacgaagcaccatactaggcactaaaaacaatgatacagaatacacattttctttgggaacttttccaagggatatgaaaaagtatggataacatacccaggctagtgaaatataagaaatgttttagtcaattttattgttttgcctagtaccccattcaggaagttttctcccaaaggtccagctcattggaaagtaaataatggtatcttgccccctcatcaacccatcagtgtcaagttgagtaataaatattgaccattcaacccaagatggtctaagttaaatatcaaactgccaaaaatggtagttaagaatatatattctgaaatatgtctgcctaggttagaattcaggttcttcctctcgttatgtgcattatgtgacttaattattgaataattaagttattcaatttctctatgcctcaatgttgtcatctgtgaatttacgtgataatagaactagtggtttattgttgggattaatgagagaatacattttaagtttagaaaaagggaatgggccatactaaaaaaaaaaaaacattaattattgctattacagttgagtcctgttggcacaagaactgggaagatataaaggagctaaagtgatattctttctcctccatctacgagaatagagaaaagtgatggagggggtaatcagaaaaagagagagagagacagacagacagaaacatacacacagacacacacacacacacacacacacacacacacacacacacacacacagagttagagagagtcagtaatcacagagatagagatgaagagaagagtttctatcagtatgtcaattagagtccaagaaggaaacagatgccacactcacatacagctaatttaaggagggcttagttagcaggataagtggaaggagtagtagctgtaatgagaaatgcaagattctaataattcatcatatgaaactgcatagggatcaggaaaataggtctgtggttaagggaagtaatcaactgacaggaacctacagaagggtgccaaatattgcactctcactctcctcgttatcactaatctgccaagcctctcctttggctgaatctaacgagaacccagaaggcacgaaagccatgtgacggcattcatatagattatgctctaggggcagacagctgcgagaagaggaggaaagagtagacctggaggaccaaaggaagatatcctgcacggagccccaactgggcatagggaaggagcatctaccatttggaaggcttcttccagttctggtgcttcctgtcttgggttatacgaaatacccttgcatgtttccacatttcctctttagcctaagatataatgagtgctttctcttatttgtaacaaagctaattttgatttaagcagaaaagttctggcaacttcaaaatatgagtagtaagtctctggctgtaaagtcagaggaggaggaggggcatccacactgtcttattcagccatggttctttctgatgaagcaatgccaggagcacacatacagcaattttttttttattcaacacaatggttaggctgtggtctctgtttagttatataatgtatttggagagaaacatttcatgcattttggatcatgtgtttattattttggaataaagaaacatccaatgccatttgttccactttaatccctgaaccccaccattgtggtaaagactgcccctacttttgaaatctaggattaaaatttgctgttgctaatttctgggggaatatttggacttcccagacccaagccattaggaaatggagacaattgatcaaaaggtaagacgtggtaagagatcaagtttaaaactggtagaagcagtattagaagtgattgttatggctcaataaggctgtgaaaataaatgatgagcggcaacagtgggatccataattacataatgaagggaattggagtaaaagaatcactcctagagatgatgaatacatggaaaggagcaagtttcaatttattgatgatacagtttctagtagagcatacatttaagctgagaatgaaaggaaatcagatgtggaattaagatggcaaaatatacttgtttaggcaggtttatgctaagcttcaacattgtatacttttaaaaaaataacttttattttctgtttgtgggtacatatgcaggtttgttatataggtaaactgtgtgtttgggtgtttggtgtaaagattacacaggtgataagcatggtactctataggtagtttttgattctctctcttctcccaccctccaccctcaagtaggccctggtggctgttggtcccctctttgtgtccatgtggttttgttgtttcattcccacttataagggagaacatgtggtatttgattttctgttccagagttagtttgctttggattatggcctcaagctccattcatgttgctgcaaagaacatgatctcattcttttttatggctgcatagcattccacggtgtatatgcctcacattttctttatccaatctactactgatgggcatttaggttgattcggtatctttcctattgcaaataatgctgtgataaacacacgcatgaatgtctctttgtggtagaatgatttatattcctctgggtatgtacacagtaatgagactgctgagttgaatggtaattctgttttaagttctttgaggaactgacacactgctttccacaatggctgaactaacttacattcctaccagcagtgtcaggccacagtgcgataaaaatagaaatcaatactaagaaaatcactcaaacccatataatgacatggaagttaaacaacctgctcctgaatgactattgggcaaataaattaggacataaaccaagaaattctttgaaatcaatgaaaacaaagatacaacatatcagaatctctgggatacacacaaagcactgataagagggacgttaatagcactaaacgttcaaattgaaaagttagaaagatctcaaattaacaatctaacattggaactagaggaactagagaagcaagagcaaaccaacctcaaagctagcagaagacaagaaataatccaaatcaaagctaaactaaattgagacatgaaaaaccatacaaaaaaatcaatgaatccaggagttcattttttgaaaataagatagatagttagctggactaataaagcaaaaaaagagaaaacatccaaataaatttaattagaaatcacaaaggagacattaccactgaccccacaggaaaacaaaacaaaacaaaacaaaaaaccatcggagactattatgaatacctctctgcacacgaactttaaaaacccagaagaaaacgataaattactggacatatagaacctcccgagattgaacctgcaagaaattgaatccctaaaaagaccaataataagcttcaaaattgaatcagtaataaaaaacctgccaaccaaaaaaagcccaggaccagacggattcaccgctgaattctgccacatgtataaagaagagctggtaccattcccactgaaactattccaacaaattgagaatggactcctccctaactaattacatgaggccagcatcatcctgacaccaaaacctggcaaagacacaacaacaacaacaacaacaaaaagaaaatttttaaattcaggccaatactcttgaagaacacagatgcaaaaattcccaacaaaatactagcaaacttaatccagcagcacataaagaagctaatccgccatgatcaagtaggctttatccctggaatgcaagattggttcaatatatacagattaataaatgtgattcatcacataaacaaaactaaaaacaaaaaccacatgatggtctcaataggtgtagaaaaggctttcgtatatgttgtttaaagtcaattttctttgcaaatcttgttgccagcctgaaatttgcatagtggggaagaggtttaaaagatcctcccaataggttttagtacacaagacacttctatagatgtccagatacaacatgtgctagaaatagtttcagtcagttttctgaatttagaaacttctttcaaggttctaaatcaggctttcatttaattgagaattgctaaggactttctgcctggaatgacggaaattaaacaactatgtgactgcatatctgtgcattcatattagggtttaactctctaaggaaaaaatcttagttccctcacatccagattcttgggggcttttcattgtgcctaccaaatactaataataattataactgctgatgcaaaggtttcaaggcaaaaagacatatcatcatgacctagggccccaaattttctattttattttagtcacaaaataagagtagttagtgtcgtctacttagatcattagttctcaaataagggccttttggcctcacaaagggcatttggccatgtccggaaacatctgtatggaataacccagcccaaatagccaatagtgttgagaatgagaaacccttctttaaatgtactcttataacatgtccctgcttaaacattccaatatatacagtaacactgctggcttgagacagagatgtgcgtgttctatcatttgctaagccttcaatggttttctcttttgttgttgaaaatgccttaagtatttgtaatgggtttttttttaaatcatatcaggagtgttatttttctcatattgatatttccttctggagtgaagtagtcagatgatgctgagaaaaaagctagtgtccatgtaaatcagaaagttttcagaaggaaagagaaaaactgcctggtattgaatgaatattatagaaacatatagaggagaacatgtcttttatttctaaacatagatatactcaaataaatacagaatcctatagatatctgggttgaagcaggttatattctgagcatcttaaatggtgcagaatgaagattgggataaatcatcatttttgtcttgttacagattaaaatggcccagagcataatcattaagcttttgtagtacaagggtcacaatcctaagaagagcagttcaggagtactcattactcccaataccaacaactaagccataacaactgtgtcttaaatgctcaacttctatttaattatctctagaagaactggaggagacaagatcactggtgtctaggaagttcatgtggttaaagacggtgtcatgacctccagctaggtctctctcttctctccacatttgctactacctaaatactgctttttgggtctcactttccaattatgaagttatctgagctcatctctgacccctttctggattccctctattcagttcatgagcccagaggaagtaagagcacaacaaaccggataaagtcaaggtctaactagtgctaagcatcacagaaagctgagtttatgtatggcctctcactgctctgctgctgataagctttcctgtttcatacaggtgcacagagttataaacatattaatatattcacagcacacacacacatgcacacacacacatacatacacctagtttttctcatattgaagctttcttgggtgagcaccatacttgctaattatactccatgccccatcctccacaacaaaaaaatttccaaagaaaacagttgaaatttcaccatgaccagtgtctggatgaagctgtcttgagaattgtggaataagcagctccctcggtgtggggggaaagaaagtgattatgtcgtatgcaaggtttttaaattgagagagaattaactcagcttataataaatcactgttgacaccttctgtaaagacttcatgctctttaaagccagaggaaatttttaactggccaagaaggaaactccacaaatattggccattatttgcacttgcaatcttcatgtgggagattctgaaggatttttcctgtatggtatgaacaaaccccacagagaatagctatctcattaagataaacaaagattgattaataacttattatcatattttacaattgggactttagaaactgtgtaatggcaggagggcctgtcttcacctttcttgtttttagcttatatgttggtttttcttgaaaaattcaaaccaagtaaaaagattcatgggagcaaaccttccttccaaggtttgaggaagaaagatttttttctttgtatttttctagtaagaatcactcactagtctaccaactttgattaaattgtatagcctttgcaggatattatttgctgccttatttattgtctcacttactccccaaaaagtttctgaagaaatgaaggtgatttctatattatctacttttagataaagaaacttttagtccgagaggtgaaggtgattcaaggacatctgggtgaaagaaagctgagccagttcttcatttgagctgcagtcaagaggacaatctctactgggtaaaaatgctttataaagatgatgtttcttggttggtagagtaaaattttgcatttcatttccaataaataatgctattcattagaaactttttcaaaactctcaaagtgctactaagcctccattagagtattttctctctctctcttccatcattatccacattctcactacctgtacaaagtgattcagtgaaaactggattcaaaaggattagtctctgtatttccaaaagagtttcagcccatctctggatgagtttctaataaaattcagtgaaatataattgtatatgctagatagcttttgcttccctccactcccagtatgctttctctctttgtccttgaccctctattctgtgcccagaaaggctgacctgtaaggattgtaacagtggtcccctcgacctctggcttccagtgggttcaaccaatgggagaccttgacaagagatttgaaggaggaaagaaagtggggtttaaatatttatcccaccagctccctccttgctggtgactcagatagccactgatgttatctgaagaatctctttataaaatgtctttctcttggttacagaaatgacttctaactattacatcaactagctccatggaactgcaatttctcttgatggtttctccaaactctgcccacatgtatatagtcagttttactataaatcatttcagataacccagattggatgagattcattgagggccctggcataaaaggacaggaacactcagactgggctcccatctttttgatagattccaaaaatgtgagcccaggactctacacacatctgcgatgttgaaaagatcagtctgttgagaagggctttagtagctcaaagtacaactgcagtattaattttattgcccaaatgataaaaaagcaagtaaataaaatgaccctattcaataacttttttttggcggggttggggatagtaggaaggaattgattcagaatcaggcataaattaaatttatatgaatgagatttaaatgatgatttcaacttagtaaaatttgctccagtgaataggctacttcagagagtaacaagaaataatcagaataattaaaggtcagcctgtagtaattgagtaaatttgcctattttcacttggtatgatattaatttgaactgattatcatgccaggactttaatatttttattgaaaggtcattttggacaaaacaagctacaggattttatatatatacatatatgcatataaatatgtatatggatatatacatacatgtgtatattatatgtgcacataaatatatatgacataggaattccactgttaacttactcaatggtttctactgtacaactcacaaatgcaaagtatatcattcaaattctgattttatgcttctagcaaacaaataagtaaacaaatgaattattttttaaaaatagtccaatgttaaataatatatatttcatgtagattttccaatttataaataaaatttatttccagctaaatgtaggacttatgttgctcattgagttctaattattattttctcttgcaacacgctgtggcattttggtgaactattttggcatcagtaaattcctaagtatagtcaatagactcctattaatatagtagggtatttttagctcaggctttagctttttaaaaccacagtgcttaaagtgtccccttacagaaaaaaaaaattactatgttcaagtataaccccattcatatatatctacccaagtgctttcgtctatgaaatgagtatttgactgataaatacatacatatttaattttgtaactttccccacaataaattatttgtataaaacagaaaaatttttatctattgtaattattttcttacctcatctggagggtctgagaagcattggcaacagcacaaatgtgacatgagtatttaaagaaaaggtgaattgcccagggctaaaaaacatactccatacatcatgttttgaacagtcatacaatagattatgatgtgactgtgaagtcacaacagtgggctcccaaatatgattttcttggtggacattaccctgtgacactttccttgtatatgtgtgtgtatgcaagtgtgtgtatgtcggtgtgtgtatgtgtatgtgtctgttgtttgcctgtctctctgcaaagcattctactcaggcacagtaatgagtaggacaagttctcctacaaacgaactcaatactgttcatcaattaactcttgcgcttccttctaaaaccacttgtgaaatcaaccatttttcctcttcttcagattagggaatgggaacaaatggagtcaacacattcataagttataagatgatattttgaggcaagtaaaattaaaaacagcaattcttgttgatgggtattcaattctgacaagcacagattacacaagtaatgcaagaggcattagtcaccaattgttgctaatccgattttcatactttagctttttataataaaattgacagttgagtcctgtgtattttacaaaattggaggctaattttcaggtcatctcaatgatcctaagcaaatccaataaatatggagtaaagatgactctttgcacaatgaatttcatatacttcactcaaattagagcctccaagtccctccctcaaatgttatatattttcactttatactagattctcttgatgtgtatcataatagcaaagaattcacttagcaaagaatccacttggagaacacacacagaaaatgaaagactaaacaaaattttaacaggtctgttcgccacttagtttctcctcttaggtgctttaatttgttgcttcactctgtacatttctggcatttctgggaggatattagtaagttactgtttcagaactcatttggatctttttcccctccagaactctcttacctctttagtgaacacatttttaggcaattataagaagctgattaaccaatctcaagacatttggaagaaaataaggtagatcagtggggaagatcattagagttaggagtaattattccaccagttaataacagctgatatcctgatgaccctatcataagagaactaaaataaacagcagtagttcataatgtgtgatggtttggggacatttggggtagtaaacaattctatgaagttcagttatgaattcttcgctgggttcacgatgacagaaaagaatttctgttcatgaagggtgacctttgcatacctccaaaaatgtaagcagcaaggctgagttgggaggatcacttgagccctgaagttaaagaccatcctgagaaagatggcaagaccctatctctacaaaaaaataaaacaaaatattaaccaggcatgatggtatgtgcctgtggtcccaggtactctgcaggctgagatgaaaagattgcttgagccctggagttgaaactgcaatgacccgtgttcacaccattgcactctaaactgggcaacagagcgagacttgtccaaaaaaaaaaaaaaaaaaaaaaagtaagtaataaagtagttaaaactgaaagttgtagagtaagactttaaaaattacctagtatagtttcttcattttacaaagcagaaaactgaaattctgagagaccactaagtgaataacgtacattcaatcaatttttttaaagggaaactaatttatcacctaaagctaacatcaagccatatcgaatatattaaaaaatgacactgctaaatgataaacaagtttggtcactgttttaaatgggataaattttgaaatctagaaccaattatatttattatttactataaatcaaaacttcaccgttgaaagatattgtcaatctttcagattataggaagttgtagaggacatgctaatgggcttcccagatcttgtttcagtgatgaactggttgactcagaagctggaatgctgctggcatagggtcagactctcagcaacaccctgtgtagccacattggagcctaaagcaaaaggaaaaatgtctgcccccatatacacttaccaaaatagcctctcatattttaaactaagtgaaaaagatagacaaaatgaacccaaatcttaagactgtaaatagagtcctgcattgctcaatttatttgaacaccactgtcaactctcataaaccttcccagtggggactcaatacccagtggtttggaaatgactattgccattacagatccatcacacaaacaaatgtctgtctttatttaaaatttggatattttttcatcttggaattgtttgcattaattttgatttttaaaaatgttattaggccaggtgtggtggcccatgcctgtaatcccagcactttgggaggccacttcaggatcacttgaggtcaggagttcaagaccagatcaaccaacaaggcgaaaccccatctctactaaaaatacaaaaattagctgggtatggcacacgcctgtaatccagctgcttgggaggctgaggcgggagaatcgcttgcgcccaggaggcagaggttgcagtgagccgagatcatgcaccactgcactccagcctgggtgacagagcaagactctgtcttaaaaaaaaaaaaaaatatatatatatatatatatatatgaatatataaaaatatgaatatataaatatattaatatatataaatatatgaatatatataaatatgaatatatatgaatatataaaaatgtatgaatatttaaaggatatatatgtgtgtatatatatatttttagactatatatgctgcacactaaaccccacctttacgacacttcccagggaaccctgcctgtgacaaatatgcagttaaattagctaatatttattgagcatatactaggttcactgcatgttgatatttttattttactctcacatcaaccagtaaggtaggcactatttctattaaaatcagttgtatacaagatagcacactttaaatgaataaagtaataataaacccatatgtaaccagcatgctgtgttgtaacacaaggtaactgaattttctttctttcctcactggcctaaatattacaaagatacttaacccgaagatgaaggcatatatatgtggtccagaacacatcttaagaagaacagaaaaggattttatacattttagggtttcaattgaaagtatcctgaaatctaaataaaattcaccaaaagagataaccttcagctatttagaaagcttattattttcctttcattcccttgtgatcctgtggatgaatgaggttttaatatcattttataaatgtgaatgatactggttaaaaatttaagttcctcataatctcaacatttttacttgttctgaaatagaatgccattaaagactataatactacatgggtaccacctattactactgtatataaacatatgaatacatatgtttgtcaagtatggtaaaaatattttcacctcattagcagacttactttgtgggatccagtgtgggaccccacaaattcatatgcattctttacaaatctaaatcaccaattagaatggcaatcattaaaaagtcaggaaacaacaggtgctggagaggatgtggagaaataggaacacttttacactgttggtgggactgtaaactagttcaaccattgtggaagtcagtgtggcgattcctcagggatctagaactagaaataccatttgacccagccatcccattactgggtatatacccaaagaactataaatcatgctgctataaagacacatgcacacgtatgtttattgcggcattattcacaatagcaaagacttggaaccaacccaaatgtccaacaatgatagactggattaagaaaatgtggcacatatacaccatggaatactacgcagccataaaaaatgatgagttcatgtcctttttagggacatggatgaaattggaaatcatcattctcagtaaactattgcaaggacaaaaaaccaaacaccgcatgttctcactcatacgtgggaattgaacaatgagaacacatggacacaggaaggggaacatcacactctggggactgttgtggggtggagggaagggggagggatagcactgggagatatacctaatgctaaatgacgagttaatgggtgcagcacaccagcatggcacatgtatacatatgtaactaacctgcacattgtgcacatgtaccctaaaactgaaactataataataataaaatagaaaaaaaaagaaattgctttagcaaaaatgttctctattttaaatgcctttgagtctggatcatttgctaaatcatattcctgaactcattgtggcacatcttttaagtctgcagttatggccccatgtttctgagcatattgtattttgtatttaggtctcttagtgttctggttcatatgaaatggcgctatttatttattataagatctcacatttgttttagccatcacaagttaatgttaggatgaattaggccctagagatgtaatatcatctttaaaaagctgctctgaagacagaaagctgagaatcaaagcataaaaagaactaaggtacaaagtctgagtgtctaagttcatatttcttgcatgtaactacgtgaacagattagatccacaatcactttttttttggtcaaaaaacagctcttagactgcaaggagaatgtgcaatgcataggaatgactggatagagatgtctgtccaatgactttgggccaaaggtggggtaaaaaatgatgaatggttctgcgaaactactgttctctctttacttgctcttgacttcacatttctcaatatttttcaaaacaacaatgatgtttgaaagaccatgtcatttggttgatttttaacatgttaatgtcccctaaatatactaccatttagccaaattatctgaggttgtgaactttctgaagaaatcaagaaatcatgcaaaacagagtctgaaagagctgaaggtagctagtaattaaatccaatctatacaagtattagaaaaccccaagcacaactacattttgtgaactaaggtagtcagcaatttgcaaccacctggttttcctaagggcctagcacagtgtcaaaccaatttaaacaagcatttattgagcatttttatgtgtctggcatggtattaagtacaacagatttaaaggtcattcattggccctgcccttgagcactcaatattaattgaaaagttttctacaaaatgtaggcattaaattattactatggcaaacaagtttataatgtgataggtcaaatactcgtttattaaagtgttagggatatatatctatatatatatatatatatagatatatatacacacatatatatgtgttgcatttcaggttatggccatttagccatattgttagaagccacactggagtgcgctcaatagaaatatatcctgtggacgtgcttgaggaaagaaactcacattttctcttaaaccttcaagatacttcatctgggccttaagggaaaaccataaggtcaaataattctaattgttacaaagcaatatccagtagcagagtaccaaatattgcaagagtttatcgacacctgaaaggcaattctggatatttttaggtagattttatggaagtggacaggactgcggaggagaccttgtattagaagccaaccatcatcgccacaatgacaatatcatacaaatgctttatttaagccccttcatctaacactttacatctactttgtttctagatgattttaaacattgctcatgtcttaatataatttgttccagagacttttcaggagtttaataagtggctaacttaaagtaacatcagaggctgtctctatgaagctaatggttctatgacatagtcatcactgagttcccaggttgtccataccaaaatagagtttatgatgtgtatgcccctgcccaaacatgctttatatgccagggggtgttgaaatgatgtcctgctggcacaggttctgtttaccacattgccttgacttcatgagttggggcacattctatttgggttgcgcaagccaagatcatcattgcataaagcaggaacccacaaattgctatttcttaggtgacccgatagtgtctgttcacagcaaaggctgaatgagaattacccctggtttctttgggacgtggcaaagcaaacttactcagagttccttggttgaatccaaaaaagaagtcatctactaagatgagtcactgttgagcaaaaaccttgtctgctactctctttaaaggttatgtgctcttctaaaattacatattttgattgatatattaatgtggctatattgtggttgcctagagacaacttggaacccagtgagttggatgatgatgttctttgtcactgattacatcatctcagacttcatgctccattcataccttagagggacagaaatatacttgcccttttcactgacgaaagaagagatatttttagattttgccttcctcatttctattaggcaatttttttaaatttatactttaagttctgggatacatatgcagaatgtgtaggtttgttacataggtatacacgtgccatggtggtttgctgcacccatcaacccgtcatctacattacgtatttctcctaatgctatccctcgtctacaccctcaccgcacaacaagccccagtgtgtgatgttcccctccctgtgtccatgtgttctcattgttcaactcccacttatcagtgagaacatgcagtgtttggttttctgttcctgtgttagtttgctgagaatgatggtttccagcttcatccatgttcctgcaaaggacatgaactcatcctttttaatggctgcatagtattccatggtatatatgtgccacattttctttattcatttgggataaggtctatcattgatgggcatttggggaatgggagggcattttattcatttgataaatatcctgtcatgtagtttaatatatttgtaaatcttttgggttgagtattatcactttaaagagactaaagagacagaaatgacagtaaacgaagaaagaaaaactttgcaaattattttcttttgtcttatttattaactcagagcaaaatgtataaacacctatcattatggttgttaattatgttcccccagctttataattgtgatcatctgagataccatgatagacatcctaagtctcttgacaagatcaattgaaaaaaaagataggtcatcattgcatatgcagttgcccaaagagccaagatctcaagaaattttgtttttcacaaacgcagatgtacaaaaaggacatctcttcatttatctagcatgtggcaatgtttttacatacgtgcacaatgcttatacacaaagtcagtgttctcatactgtacttttatggagtcaaatttgccaaaaacagaataaatgatttagaactctcaagagtctttacaaaatatataccagtattggaaatggtgtgaagatgaaatacatagcataaaagttatacaaaataatgctaacaacttaaaatagcggggataacaggaaaaaaaacaaaacaaaaaaccctaaaactggctaaaaataaaatctgacatatgtaaatgcatatcacagggatagattaggaacaatttcatgaaggtagtccctaagggctggccagccttgataatcattaactatgattaataagtcttgcattgcaatgaatagctgctttttatctttgagggcatggctttcctgggagaatatattcacattcattttctacatgacgctattctttatgaaattcttctacgattcaatatataccaacatgagcattccctattaaattttcctgtcttctgcgtcatggttctatgtagtttggggtatacaggaatccatttcccatgtacttatatagagaccccaaattcggcagaaacagtacaagtaatcaaacagcaaaaattgtgttaaaacctttttatcctactgtggacataattattttctaaccagtcagtgactttgctgacttcttcaggcaaatgtggctttaattcaataaaagctcctgaatttttatcaactgaaagggatgtcagtgtagacaagtgacacatttttaagctgatatttttgtcattgccattgtggccaatttactcatctgaattttccaccaaatgcaatttactcatctgaattttccaccaaatgcaataagaaagcaacagttctgcctactatgatgccaccaatatgaagccagtatcctacacacagttacaacctcaaggaaaccctttcttataatttgactttcaggattttgatatttgagattttaacaatttgagattctgattcttgagattttagatattagggaatttagatgttagagattttaatcttttggaattgcaacatttggaattatggcatttgggactgtgtctttcagaattatggttggcagtggtgctctcctatagctacaaggatcagagaaactcttctctttgcagaagagttttttaatgatcctcaaaagatcaaaacaattaaacatttggagataagaaggccactggctgattatttgacttatgaagactaatatgttgtaaagtgaatcagaacaggtacctgagagtgacataaatatttagatgacaaagaatcttaactaatgtggtggcactataaatataaagccatgcataagtgtacggagaaattcaagggggatatcactgagatttgatctgacttttgaggctgagtgtgtggtagaagagtagcactaagaacagaaaatgaaatatcaagaaaataaatcactgtgatctgaagatagaaaggaaatactgagctcagttttagatgtttatcctagttaactgtgatgcctttcaggtggtgatgggtcatccaggtaaatatgtctatcagatatttgtatctgtggtacataaatttgggataagtgtcaggatttgagaatttgaggaagtaaaatttgaagatgtgaggccagaagatatttttctagtcttgaatttaacaatatctatataataacacaattcaatattttttgttcatgtatctctggatccaaaggaataaaagagatttccacttctgagatggagtgaatgtactttttccttttccttctaagctcaatgaaaaatcctgcacattatgtataatgcaagcatgagaagactctgaaaggtagagagaaaaaggcagactggctatgaaacttaggacccaagaaaccagaaagaagtgagttccctcacttttctttgtgtctcatatgtcccagacttggggctgaagaagctagcaatccagaaatgccaatgaatacaggcaaaaggggccaaaataaaagcccactctctctagccaaaagtccaggaaaggggcaacctacccagaaaacaaaaaaacaaacaacaacaaacaaaaacaaaaacaaaacaaacacacttttagacaatagatattatactccagtaaaaactcacagaaaataatatgcctctgcccctcgtctcacaagcaaagacaggtgggaagcctaaacttcaacctggatgtaatcacggagcccagatctttttctggggtgatgtcaaagaaggttgagtaggagaccaagagtttcatctccatcaggcagtcataagtcttgccttccccttggtgtcaggggagaacacatggagagcctggacttttactctgaaagaatagtaatgaaaggtgctcctcccactccccactgaggaggtcaaaagaaggcctaataaagactcaagattttcatcattacctggcaaaaattggtccatcctctaccctgtggtatcagtggaggtcatgaatgaagaaatagcaaggcactcctgtccctcccaatgagagagggacaagataggaattacatccagcctttcctcactaatcatacaagtaaggagagagtggagttagataaagtgttgagagaaagaagctaccaacttagaattaggtactctatagaatttttttttaagtgaaggagatagaaaggctttctgagatgaacaaaattgagagaatttgttgccagtagacctgctttgcaagaaattttacaataagttatttagagaaagaagattatgtaggatagaaacagatctatacaaagaaaagaacaccaaagaaaaaataagcaaataaaattgttttttcttattcttaactgatctaacaaatattttgttcaaaataataatagcaataatatattcaattacagatgcttatgtatctatgcatatatgtatagatctatttatctattcataaacatatatgtatttatatgaatgacatcagttatacaagggacaagagggagtaattacaattttttgttattataagatattcacactatacatgaagcagtagttgtaaatgtatattgcaaactttagggcacccactaaacaaaggtaaaaagaaaaaaaaaaagaataactgacatgctaaggaaagagtgaaaatggagtcatattaaaatgttaagttcaaaccacgaaatgcagaaaaagagtaaaagacataaatgggaacaaagaagaagggcgacaattagaaaacagtaacaaatatggtagctgtcaatccaactatattagcaatcactttcaatgtcaatggtttaaatatatcaattataagaaggagattttcaaagtggatcaaaaaacaagatccaggacagatataattaaacttctgaaaaccaaaggtgcagaaaaaaaatcacaagagcaataagagagaaattatatcttacccatagaagaaaacatgtgaaaggacagtggatttctcatcagaaaccatggaggccagaagcaagtagcacaccatttttcaagtaaagtaaagagctattaacccagagtcttatgcccagaaaaaaacatcctctgggaatgaaggggaaatctacacattctcagatgaaaaaagatgaagagaacttgtcaccagcagacctgctctaaaataatgggtcaagagagttcattaagcaaaacaacaacaacaaaatacaagtaagaatcttaggacatgagtaaaaaagaaacaacataattaaaaaatgggtaaatattatacactttccttttctttttatgatatataaattatctgactgttgaagtaaaatttataacgttgtctcatgtagttctaaatatatagagaggaaatatttaggatgattataagcagaacaggataaaacaatttaaagggagataggatttctactcctcacttgaactggtaaaatcacaaccagtaaactgtgataagttacatacatataattcaatatctagaggaatctctaaagagtttccacaaagaaatgtactcaaaccccctacaaatgaatgaaaaatgaatttttaaaaatattcaagaaaaccacaagaggccagaaataagaaaactacaaaacaaaaaacagagagaccaaatagataaaaaaacattaaatgacagaatgaagctctaacatattaataattactttaaatgcaaatgatctaaatatactgctgtggtttagtgtgtcatctaaagttcatgtttggaaacttaatccataatgtaacagtgttgggagttggatcttaaagaggtgattaggttatgaaggctctaccctcaggaatagattaatgtgattatcacaggaatgggtaagttatcgcaagataacttctgctatgggatgacccaatatgaaggctttcatcagatgctcatgccatgctcttggactttccagcctccagaaccatgaaccaaataaacctctattgtttctaaattacccagtcttgagtaccctgttataatatcacaaaatggactaagacataaccaatcaaaagatgaaaattggcagattagattaataaaaatgacacaatcatttactgtctacaaaaaaaaatctaaatctaagactacgggtaagttaatagtaaaaaaaagaaaaatatatattaagaaaatattaatggaaacaaaggactgctatgttgatatcagataaagaaataaatccaagatagaaagggaactgtataatgataggaggttcaataaaccaataaaacatagcaatcctaaatgtatatgcatcagacaacagagctgcaaaatatgtgaatctaaaactgaaaaaattaaaatggaaaaacagaccaatttacactttaattgaaaatattaacacccctctcaacaactgatactccaactaaagagaaatcagcaaggaaatataaagacaccatcaagcaacagtgtctaatcaatacttattaaaaaaactccaccaacagctgcaaaatatacgttattgcaaactgaacaatacatttctaaggaatctaaatgtgaagaaggaaatctcaaaggaaaaatacacaatgaactgaatgaaaatgaaaatacaagtgatccatgacttaataatggttcaacttatcatatttcaacattacactggtgtgaaagtgatacacaaacacaagaatttttttttttttttagatagagtcttgctctgtcacccaggctggagcgcagtggtgtagtctcagcttactgcaatctccacctctcaggttcaagctattctcctgcctcaacctcctgagtagctgggattaaaggcactcactaccacgcctggctaatttttttatttttagtagagacagggtttcaccatgttggccaggctggttgcgaactcctgacctcaagatatctacccaccttggcctcccaaagtgctgggattacaagcatgagccaccatgtctggccaaacacaaggttttcaacttcaagcaccagtgattcattgagtaaagattctctcggctgcatttttgatttgcaagatgaaaagacaaaagttactaatctgaaaaatgagttaggagatatcactacaaaccctgcagacattataaacataatgagaggaaactatgaacaattgtatgcatttgatgacttagatgaaataggttaatgcctcaaaaaacacaaattacaataaacaccaactatgacaattcaccagtatgaaaaagataattctgatattttgctagctccataactcttaaagaaaatggatttatgatttttaaattctcaagaaaaaaaataaagaaatctccaggcccaaatggttttacttgtcaattctaccaaacttttaaaagaagaattaataccaattatacacagtctattcagtaaagaagaggaggaaacctttctcaattgctttaatgaggttaggattatcttgacaccaacatagatgaagacaaccgtgaagaaggagagagaaaggaaaagaaaactaagcaccaacacctgtcatgaatatatgcaaaaatccttaaaaaaattaacaagtagaagtcagcaatatataaaaggaattgtacaccatcaccaaatatggcatataccaggtatgtgaggctggttcaatatttgaaaaccagtcactgtaatacaccctattaacaaactaaggatgaaaaatgtacatgatcataacaatcaatggagaaaaagcatttgacaaaactcaatactaattcataaccctcagaaaaaaaggatacagaaaaattttttcaaattgataagatgtatctttaaaaagacacaaaaaacttcttacagctaacattatacttaatgttgaaaggctaaatgtttctccctatggcaagttaaggatatcttttctcatcaccctattcaacataggctggatggtctagccagtgaacaagaaaataaaagacttacagatctagaaagaaatgttcttatttacaggtgatacgattatccacatggaaaaactcaaggagtctacaaaataaaaatcctcctaagaataataagttagtttatcaaacttgcaggatataaggtaaacttgcaggatataaggtaaacatgcacaaattaattgtatttatatgacctagcaaagaacacatgaggacttaaaaatacaattcaccatcagtaaaaagtttttttaaaaaaactttaagagtaaagctttcgagacatgtgcaagattgtatgctgacaaccacaaaatactgaaagcaatcaaagctctaaataaagggaaagacataatggatgtatagatcgaaagactcagccatagtaaagataaaaattctccccaaattgctatacagacatataaaaatctcagtaagatttttttatagacatacacaagactgttctaaaatttgtctgaaaatggataaaaaataaggtatttaaattaatttttgaaaaagtcaagtaaaatgaaaggagcaattttacccaatttcaaggcattacgtaactacaacaatcaagattgcatgttactggtggaagcctagccttagagataaatggaacagaatagagaacatagaaacagattcacacaaatatgctcaattgatttttaacaaaggggcaaaaataattcaatgaaagaatgatagcatttcaacaaatagtaacagagcaattagaaatccatagatgcggccgggcatggtggctcatgcctataatcccagcactttgggaggccaaggcgggcagatcacaaggtcaggggttcaagagcagcctgaccaacatggcgaaaccccctctctactaaaaatacaaaaattagccaggtgtggtggcctgtgcctgtaatcccagctactcggaaggctgaggcaggagaatcacttgaacgtgggaggcagaggttacagagagctgagatcacacccctgcactccagcctgggtgacagagcgagactccatctcaaaaagaaagaaagaaagaaagaaatccatagatggacacagaaaaattagccttaacctagttgacataccttatacaaaaattaactcaaaatgggcaatgaatttaaatataaaatataaaggtataaaattttaaaaataaaacagaagaaaatatatggatcatactagacaaagcgttctcagagttgacatgaaaagcatgatcccaaagagaaaaaaatgataaattgtattttatcaaaatcaaaaacttggccaggcgtgggggctcacgcctgtaatcccagcactttgggaggccgagacgggtggatcaagaggtcaggagatcgagaccatcctggctaacacggtgaaaccccgtctctactaaaaacacacaaaaaattagccgggtgtggtggtgggcgcctgtagtcccagctacttgggaggctgaggcaggagaatggcggcgtgaacctgggaggcgaagcttgcagtgagccgagatcgagccactgcactccaacctgggtgacagagcaacactccgtctcaaaaaaaaaaaaaaaaaaagagatactctgtaaaaggtgaaaagacaaacaatagactaggaggaaatattcctaaaccacgtcagacaaaggactagaatctagaatatataaagaacacttaaaatgctcaacatcattagtcattaaggaaatgtagattaaaaccacaatgagacatcatctcacaccagttagaaaggctattaccaacaaggcaaaaaatgacaggtattggtgaggatgtggagaaaagggaacccttgtatactattggtgggaagataaattagtgcagctattatggaaagcaatatggtaattcctgaaaaaattaaaaatatgactatcagataatccagcaatcttactactgaatatgtatcaaagtaaataaaattagtatgccaaagatatacctttactcccttgttcattgcagcattattcacaatagccacgatatggactcaaaataagtgtccatcaatggactactagataaagaaatggtggtatatattcacaatggaatattatacagtgtttaaaaaaattctgtcatttgtgacatgtttgaacctggaagatactatgttaagtgaaataatccaggcacagaaagacaaatacctcatgatcccgcttatgagtggaacagaaaaatgttgaactcatagaaacagggagtaaaatagtggttgacagaggttgatgggagattggagagacactgatcaaagaacacaaaatttcagttacacaggatgaataatttcaagagatctattatacatgatggtgactttagtaaataataatgtattacatacatctttgaaaattgcttagagatagactttaagtgttcttaccatacacacaaaaaataagtacatgaggtaatgaatatgtcaaaagctttattcagccatccataatatatacatgtatagaaatattgtgctgtacgtcataaatagatataatttttacttagttaaaaaagttaagaattaaaaaaaacacaactgtttaaaaaacatctaggcaaaacacaagaaatttcaccatagaagacatacagacggcaaataagcacgttaaattttgctcaatgtcacatctcactagggaaggatttgcaaattaaaacaacaatgaaatgcatctatacaactattaagatggcaaaaatgcaaaaatctgacaatgccaaatgctagtgagaatgtggagcaacagggattctcagtcactgctagtaggaatgtaaaatgatacagctgctctaaaacacagttcggcagtttctcacaaaactaaacgtgtaactgccataagacccaacaattgtacttctgggcatctatctcagagaaataaaaacttattttgcacaaatatctgtgtgtaaatttttatagtagttttattcttaatagccccaaactgaaaacaactctgatgccattcaccaggtgaatgcttaaacaaactagaatatcgataccttggaatgctacataaaaataaacaggaacaaaccataaatacatgcaagaatatagaatctccagagaattatgcttggtggaaaaaaaatcccgaaggttgtacactgtactttaataatgtttctataacatttagaaataattaaattatagaaatggaaaacaaatttctggatgccagagtgaaagaggagagaaactgggagggaaatgggaatggctataaaagggtcacatgacagatgcttgcattgatggaaatactctctatcttgactgtatcagtatcaatattctgtctgtgacatggtactatggttttgcaaactattaccttagtgagaaactggggaaagcgtaggtgagatctccttgtattatttcttacaaatgtttatgaatcaacagttatctcaaaataaaatgtaattcaaagcaaacaaaaaacaaatcaaacaatatgaaaggtcagatcttcctagtagcactaacttacccaacattgattaggtataattcttgggctgctggctagtgttctaaatgtacactttattatgaggcatgaaacatgttgggaagccaggcgcgctgactcacacctgtaatcccagcactttgggaggtctaagtgggcagatcaccaggggtcaagagttcgagaccagcctagagcacatggtgaaaccctgtctctactaagaaatacaaaaattagctaggcttggtggtgtgctcctgtaatcccagctactctggaggctgaggcaggagaatcgcttgaacgcaggaggcggaggttgcagtgagctgatatcgcgccattgcactccagtctgggctacaagagcaagactctttctcaaaaaacgaaaacatgttgagaaagtaatgctgttatgcaaatcctatgtttcactttcttgagttatggatgattaaatttgtaatcttaaaattgcactgccatgtgagtctaaaatttaataaactggttccacaaacaaagggaaaaggatggtattccttttaaaacatgaatcaagcagaactgtcatcatgtagataaatatatttgaaaggatgaagcaagatgaatttatgtgtacaaattaatttttttcaaataaactatggaactcgtatgaaaataagcagtaaatatttacattgtctttaaatgttaaaatacttatggaatgggatatggggtagcagtgtgcagctatgctttttaaaattttatttcatgatctaattaaaaatatccccagataaaaatcaaacacacaaaatctgcaatatggagtggctatcactctgatatattaaataaaatcacctagtgattcaaaataaatttaatattttcaaacatataagaattagttgttcttggattttttgtgccttatctgactggaaagcttttacaaagatattaataagataggcaacaattttggcttcttcattttaataaagtaatttttcatcccctcaatgggtgggccattggagtgtgtaatatgttttctcattggaagcatagccttatttcattgttttataaattaattccttcttgcaaatatatcgtaccaacattctgtttgtaatatattattcacccttaccttctgttctagagttctcttccagcacattgctaataatgaaatagcctccaatctgctcactgcccagactcactgaaaatcaaacaaaagttctcaaagcctatagacctgagtaatttggataccacaagtgccaaatggcttaccactcttcccctcacttgtttttctgttaacacacaacccctcttggtgtttttcaaacacatatagcatattcccatctttggacctttgtgcataccttccttctaactgaaacacacttatgattatccacatgatgtatccctctactgcattcagctccctactcaaatgctaccttattaaagaggtatttttcggtgcactctaaagtaccctgctgcccatcacttcctatcttttcatcttacttcatttttctgcgttatactgaggtatcattatataatcctgtgttagttgtattcccactgcagaaatgtacgcaccatgaaaacaaaaattttttcttactcctgcattcaaatgtctacaacaattaatagtatataataggtgtgcagcaaatatttgttaaataagtgcattaattaaatacattaacatactataatttaactggcttctcaataagaattcttcatggatttcagaaacccttataaaaaatcatttgcaattttctctgccgaatgtagaatgaatttcaaatgcctcaatatgagagccaaagtccttgatgtatggcctgaaccacttctttccaatttattcttccatttccacctaacaaaagtcttccaatttaacttgttcattatttcttgaacttgtcctgttactcactacctagtagggtgatcaaccctcctagtttgcctaggattgaaaggtttcctggaccacaggactatcaatattaacactggcagactaagatgagtggtcattctacaacctcaccttactcttccctttggctggaaggtcctctgttttcttctttactagccaaggacccctgtttcctataaaatccaacttcagtctcacatcttcagcaaagtctttgagtttctgccacattccatgaggttgtcagtacatttaatagcaattcttgtttattattttagaaaatacgattctattttaaaattcatctattagtcatatgtataagtacattctcctcagtggaatatatccctagaaagtaggaactatatctcattttgtgatatgtctagccatctagcatagtgcttgaaatgtactaaatattcaacacgtttcttattattgatggacatattctatcctttgagagctgactatcttaaatggataaataattatatggtaggctgcttaaagaaagtgtgaggtagagattaaaatctaaaatacatggtttttggcaaactcaaaacaggaaataattttagtttaaaataaaaggaataaaacaaagatcagcattgacattactctttttgaacagataactaatgttcttcctattatttcaccctgaatgttatggattcatgaaatgtccttaggattgaggtttaaattggcatttacacaatgccaggatatgcagtaaaaggaggaaaatataatgaaacatcttgataacttataatacagcatgttctactatatggcaacatcccaatgactaactgaagtttttacctttcatctagctattttggtactgtatagacacagttcaataactggaacagtaggaaaattgccacagtaatgctgaattttactggcttagcaatgaggggaaactcacatattgcttgccagaaaaataactggctttagttggtgctattagtctcacggtttttaggagcacttaatttaaaacaaaattgtgggcttaactcccaccctaatgttttgagacggctgtaataagcaaaggttcaaagtgttctttatccaaacaagtgggtaagcttcttgctcaagctccatctataacaaaaagattttcatttagtgagtggtgatccctgatctagcacaagcaaacacatcaagatgcattcaagcttatggcacagaaatttctgagcagtaatgtttaacctgacaaaataatcactatggaaaaacaacttacgaatcacaccagccaccaaaattgaagcttggtttcctaactggcttgtaatggtagccctgaaacaatatgagggattgttaatagagatttagagttactatcttatgcctgcacttgtaacattaattctggcctgtttctatagagctggtaccacatcaacatttgaagaatgttgggataatcccttccatactcagagtatcttaaaagactctaccatatttcaatgtgtataagccttcagcaataaaattctgcctataggcgttaatcctcatttcatctccatcagcaacatggtttacttgcataagagtgtaggggaaaacagaatacaaaataccttctaaaagaagtgaggtaacacattttttttcaagctatatcatggtttccctcaggcctatgaaatctgagcttttcaaaggaatggtactacaatgtatcatattcctacttctagtgttgttcattttattattaatgacagtatctataacactaacattccatacttaatattgtcttcacttatggtacctgttacctcttgagatatcattgtatcctcatcttcataggactgatgataaaggaaattcacacatacacacacacacacacacacatactcactaccttttatccagacattgcattaagtactctgcaagtattattcctaacccttaagacaatgtctccacataggaattatgttaactatgttacaaataaaaaagtgaatttttgcatatcaattgcataaagggttcatacggggccttttatggtggtaggtcatcttccttgtgaacctcgtggctctttttttttttctttgtcatacactgtaatttggcttaaaagaatgcacagtcaagctttatataattgaaagaaagctattgacggagatgattgcaatgtctcagtgggcattggtaaaatcttatttcacttcccaccctccagatagtgcatgggaatgagtcagctctctttccttcatttttacaagctcaacctaataaataacattgctagaagtaaaacaaagtttcatgtaatgaatggtaatgataaatgtgtttctgatagtttctgtagcatttagactaaaactaatttgagaaactaagacaagatatattctaagtcagaagaacaaacaaacaaaactactgtgtcccccagagtgactagaaaactagtatcagagtctgaagacagattctctcctctaaactacaactttgggaaaatttctttctcaatgagtgatttctatcttcgactttctatcataatgaagtagtaaaggtctattgagtaggtattgaacataaaaattttaactatcactgatgaaggttgttacaaaaatttgaggcttttgaaaatttgaaaatttgagactgaaagtcacaagtgtctgcataacagagttctggttaatcacatagatgttctctccaccctggctcattttctagctctaccgattataaagcacgtgaataaatttgggtaacattcttcaccattctttgcctgcattttctcatctctaaaatgaggataacagtaataactactaggttatttgcaacaaactaggtttgttgcaaagattacctgagttaatgtatgtaaaatgcttagaacagaactggcacatagttacctaaataaggttctgatgaaaaggactaacacacacttagtaatgtgtaaattattcattcaaaaatgaaagtatcaatgaagaatatttaatattatgtttgcttcttgaaaactttagttctcagcccacaaggtaaataaaccataagtctggataagggaggaatggaaaaaaaagggaaggggtgaggaggtggaacttgagtagcttagaaaggctatatgccgtaacaaatatcctgaagcaagaacagtgtctgtgacaaagagcatcctttgctttttttattgaattaaagcatgctgcattcagccaatccaagccgtactgcaccagacctctactttctaatgttccatctatgtttaaaaaaaaatcagctgcaaaatgtatagacaatttacaagtctcaaagagcatatttgtcctggggcttcctagcatagatgtcctaatggaggaccctgttggtggaacatcattaatcaggcagccatggccaaggaggtgggtggctgctgatagttttggcccattggaaatggctttggatgactgccaggttgtgtgtaaaattttgaaatgtttcaaacaatacagtctttacaatgttataaaatactagggtggttagagcaggctgcagactggctcttggccaataaaacctcaggattccagtcagctgtaacctggagtttaatgttgtctggggtgttcaaggtcatctctccccaaagtcctgtaggtcaagtcagtctttataaagcggccccatggagctactgctttctaatcaccactgttcaaaaatccttttagtcaatttgctttctccccaggaaaacaaaacaaaacaaagaaacaaacaaaaaaaccaccaaaaaaaaaatccttttgggagttagccttaaaagtcttactcagaaagactttttttaaaaattgaacttgcttttttttactccctatttaaatggaatatacttgctattgacatggtggtaaacataaaatacaagaaatcacccttattccatttcccaaaagcaaccatctaaattcatgatgcatgtcacagtagttcttctttctatgtgtattttacatactgatcatcatactaaatatataattcataattaccttcttccaaaccttataccaaaattttttgtgttaatataaattttttaatcataatggtaatggcagaagaatatttcattgtggttgtaccttacattcaaccattctcacattattgaatgcttatggtgttttctttctcagtgaggatgccatgttaaataacattactctgatttgttaaatgaagcttttctgtatttaatattatttcctcaggataaattcccagaagtgacattaaagggtcaagaaagatggacatccttagagtctttacaaatgttgccaaatggctttccaaaaggattttttttttctgcaattgacagcctgtcagtacagtatgaaagagtctgtttcactccctcatcatcagcaataggttaaagcaagctttcttctaaagagagcaaaaactttttaacattaaaaaattaaaagttttctcttccaaaattgtacacatcagtagagataagtatccagcagtgttacattgaaagggtcatggatctacttcatgagggattttttttttcagggtgattttttttttcagtttgttctccaagcaagaaataattctccaaacaaaagggaacttaattctgaggcattaccgtagcacatcaaacatcaaaaacagagataatataagatagaatgctccagatacacagaagaaaaaaattagatctacaactttatgcactttcccagataatgagtcaaaaagcgagctagcaagaaagtctgccttgggaaactgttaataaatgcagagtacttaaagaacagactttgagaatgtgtacaagcaaactttaagaatattttgtgctgggcacagtggctgaagcccttaatcccagcactttgcgaggccaaggctgttggatcacctgaggtcaggagttcgagaccagcctggccaacatgacggagccccatctctactaaaaatacaaaaattagccgggcatggcaacatgcacctctagtcccagctactcgggaggctgaggcaggagaatcgcttgaacccaggaggcagaggttgcagtgagccaagttcgcgccattgtaccccagcctggatggcagagcgagactccatctcaaaataaataaataaataaataaataaatataaaatttgcaattataacagaggccttgaatcaaaaagaagatggtccaggagtaatagtaaggggtaagagaagggtaggggatgaggaaagggaacctggaagaagaatctagatgagaccagaagagagatgattatttaccctcccatgcagattaaatagcatctccagcttcaaagaactgatgtgagaatcccaataaacaacgtatatggttaatgtctaaataactatatagtaaaacttacattgttgccattccagaatattctttggtcaagcttcaacttaatacatcctctgtaaatatttgtatatatttgggttaatggcaatgcacgttactaccacagttaagactttgctactttaaaaaatgtaaaactgacaaacacctcctcttaagaaaggttgattcaatttttgtctaggtgtactataaattatatgataacttccctggccatgatgtttcatttaggggtttattagatactctagctagttggagagaattgcttactcttactcttttcttttcttctgaaaggtatatatagttttttgtaagaactgatcaacttctgagctgaactgcttttcagaaatgttcataggaacctctatgcattttaatgtttatattttatccactttaataagtctagaggtcttatctggatattcacattgatgcttttctttatcattttggctgtggatagcatttgtgttttgttttgtttttctctccttcaggttcccatcatttgtgtgtctttttccccctttgctgataaaaattaagtacaactcatgcttctacccatgagtccttcattttaagcaaaataaaatctacaaggaaaatcacgactatataagatattctggtttcagtgaaactagacatttaccagatgttgggcacttgaagtcttccatctgtaacatactgtgtcttgatttcaattctcacatctgttacttagctgagtacttattccttctattcttcagtcagctcatctcttaaacagagataaaaataatacttatcgctagggtattggaggaaattaactgagttaatgagctagagtgcttagaacaatgcctacacacaggagagtgcattaaacgtgagatattacataaattgttataaaataaattctatcaccatcttacattgactgcaatgctctttacctccttcaattgttctccattgtgcaagcatcttcagcttgtggatttccagaaggctttgcatgacttcccaccgagcaatgctttcccctttcttctcctccagtggattgtttcaatttagactatggataccattatcttgcaaacataaaaacacaacccgctaagtctcttgatacctgtgaggctatgtgtaatgtcatgagttaaaataccaactttactttatgacttaaatatactcatataaataagaggtatccagtgtaaaatcactaactactgaaatctatacttaattcattaagtattccttaatgagtcttcaaattgttttagctgaacttaaaattatattttaaaacacctttatacttataacaaaatactaggcagtataggttaatgcaaattactgttctcaggtgttgtcccttatttgctagtatgtttctatatcatagattatacatgttgttgctgaaagagtaaaaatgcttcctttaattcaaatccattaccatcctaaccttttaataactctgcttacattttaaatctctttaaaaacatttctaccataattaagcaaaatgctagattaatgactgattgcaaagcagctgtgtcaaaaataaacagaactttgaattcaacaagcttttctttctccaaactttgctgtgtacataaacacaccccatgtccccatatcctcttcatatttcacacacgcgaaattattcccaattaggtgtttctctatttgccttctttctcattaaaatcatccccagagtttagccatcttaattcactgcccagtctaaaagttttgcacttccaagcttctactcttgaagattttacatttacagcagactgactcagtacactttggaaactctggtgaacagctcagcccaatgctagtcttgatgcctggccaacgggcttaaacaacagacataaaagctaaatctgtacttccatttagttatgaggttgccaagttagttttcctgatactgtacctacagtatatccatctcccaatgtctcagactcacttcattaactttgtgacatcagcctctgatgttatgaactcaattttgctaatataaatgatacagtactatatagaaatttaagaggttgtaacattagaagtctcttcaagattcccataacagttaaagaacaaggaaccaaaattcccagaaccaatccttgctgggaaataattccttatatataatcttaaagctactctccctcccccaagccctctgcttctgattcccacttatgttgcaaatagcttttaatgatagaacagggaaatatattgcggtttcacactttcggggattttatggtcacttattcctaactaggagatagagacacatagcagaaaattttgttttttcttttttaacttaaactggtttagtatattgtgctctttgttatatggatatatttaagacatgacacttcaaagatcaactaatagaagaatgctttcttaatgacaagcctctatatgcatattacttaccctttatcgggtttataagctcagtcgctaaattgttgtgaccaactaatatagaagctccaatttaccaccatgaatttacatcatatcacaaagagcatggacacaaaatgctgtattgttcccgagaagtaaggaatatttgcccaacatcaattatacctcagaaaatgcactttacctaaaaaagccaaatttatggagatttacttatatgattcaaatctcactcttcacatcttcttctttcttcgagcttaacagccatccctaatcatggcgtacgttcgttaatgcatacataaggaaaagaatgcaagctgtgttgtgaagaagttaaggcatcagactttctaagtacaactgctggctttactagtatttgatgcacgttcttgaacaagttacttagcagctctgggccttaagttcccctctgtaaaatgggaaaaatcatccacatagagctgtaatggaactttaaatgacatagtatatgtgaagcagttataataattataattataatagttgcctagtaaattaaaaaaattacacacacacacaccacacatatacagtcatatgcagaataatgatgttttggtcaatgatggaccatatatacaatggtggtttcataagattatgttagagctaaaaaattccaatcccctagtgatgttgtagccatcgtaacatcatatttttattttttgtgtagcctaagtgtacagtgcttaaaaaggctacagtagtgtactgtaatgtcctacgccttcatattcactcaccactcactcactgacttcctcagaataactttcagtctggcaagctctatccatggtaagtaagtaattctttaagtcttttatgccatatttaaatctattatgccatcttttctatgtttagatatacatatatttatttgccattgtgttacagatgcctacagtattcaatacagtaacatgctatacaggtttgtagcccaggagcaatatccttgggtgagccatatagccttggtgagcagcatgctgtaccacctaggtttgtgtaagtgcactctatgatggtcatgcaatgatgaaatcacctaacaatgcatctcttagaagttttctcattaatcaacacatgactctctctctctctctcattttatatatacacacacacacagacacatacagacacacaaacacatacacataactaagatgtcacatgttcattgcagcactatcacaatagccaagctatggaaactgccggaatgctcatggatttttaaaaatgtcgaaaatacattcaatggattaatcagcctaaaacaacaacaacaacaacaacaagaaaatcctacaaatgcaggatgtggtttggctgtgtcgccacccaaatctcatcttgaactatagttctcataatctccacatgttgtaggagggacctggtgggaggtaattgaatcatgggggcggttacctccatgctgttctcatgatagtgagtgagttctcacaagatttgatggttttataaggggcttttccaccactttgctctgaacctcttcctgccaccatgtgaaggatgtgtttgcttctgctcctgccatgattgtaagtttcctgaggcctcccagccaagctaaactgtgagtcaattaaacctctttcctttataaattacccagtcttgagtacgtctttattagcagcgtgagaatagactaatacaggcaacaatatgaagcttgggggcattatgctaagtcaaacaagcaagtcatgcaaagactaatactgcaggattccacttacatgaggtatcaaaaatagtcaaattcatagaaacaaagaagacagttgtggttgccagagattgggggcagagggaaatggagaaacgttaatcaagggatatatagtgtcagtcatgcaagatgaatacattctaatgatctgctgtatcaaaaaatgcatttcagttagataggaggaataatgttaacaggtctattgtacaacatggtgactatagttaataacaatgcaatgtattttgaaaattgctaagagcagattttaggtgttctcaccataaaaaatggtcagaatgtgaggtaatgcatgttaattagcccaactgagccattccacaatgtactcataattaaaaacatcatgcgaatttttcaattttttaaaatttatttttatttaattaattaattaaataattttgaaatggagttttgctcttgtcgcccaggctgtagtgcaatggcacaatctgggctcactgcaacatctgcctcccaggttcaagggactctcccgcctcagcctcacaagtagctgggattacaggcgcctgcttccatgcccagctagtttttgtatttttagtagagatggggtttcaccatgttggccaggctggtcctgaactcctgacctcaggtgatccacctgccttggcctcccaaaatgttgggattataggcgtgagccaccatgccaggcctgtcaattgtttttttaaaaaagatctgctgtacaacattgtgcttatagataacaatactgtattgtagatttaaaaatctgtaaagactgtaggtctcatgttgagtgttcttaccacaataaaaaagaaaggaaaagaaagaaaagcattttcagttgaatatttactgaatcataaccataaagacgtaattgccctttaacatctctaatgttaacattgatccaaatttaaattgatttctcctgtgccttaaccttctaaatcaaatgcctgtctagcttctggagtatgagtatgatgcagcatttgttgacactgtatcagtattgtggggaaagtaaagacagagatagcactaattatcattaaccttggcccaggtcttcaaatgacctatgtggtcttaggaaagtcacacatccttcatttttataaattcttaaaaaaaaaaaaaaaaacaactctgccgtaactatctcaccagaacttttacatccaagtctcagttcaaatgtcccctcttccgtgaagacaaagtgtttcatgttttccattacatttgtaatggaaacacttagaatgtttccaacatagatcactgtttacatacttatgctatttgctggctttagagagtaagacatttctatggtttgaatgtcccctccaaaaatcatgttaaaatttaattgccaatgtaacagtattaggaggcggatcctttaagaaatgattaggccacgagagctctgctgtcatgagtggattaatgccatcatttcagaagtaggttagttattgcgggagggagctcctaataaaagaaaaagtttgtccccgccattccttcttttctctctctcctgctcgctccctctgtctcatgctggctttcactttctgccctttgccatgggatgaccttggccatatgctggcaccatgctcttggttttcccagcctgtaggaaaacaatcgtgagccaaattcatttctagtctttataaattacccagtctgtggtattctgttatagcagcacaaaatggactaagacagcaacttcctttgtgtctcccgcaagagcctattagatacttgctgagttgaattaaacactaaatgtgaaagcatagcatactacagctatattgagtggtggttgggattaaaatctagattgttgggttgatattttagtggagcaagtgtttatctttgaataacgattccaaattcccacatttggatgtgaacatttggctatcattattgattcctaggtattttcccatgctatttttagtgtcaaaagattaaaatgatacttaaaaacaacatcaataacaaaaaaactaattataaatgtcatcttttaaatctacaatagggaaaaagaatgtaaaataccttggaataaatgtttacgtcttactacaactataacgcaatcaccttttctcccattcccaatagtttcaagcaaaaaatgtaatggccatgggctttgggcctatcagaacaaaggcttgaattaagcaaatagattgtttcaaacagcagcatgacagtaaaaagattaatgagacacatcttggaaatgaatagataataacatactcttttctcagatttccccttgcccctcaaaatcgatgaatcgcatttaccctcaatgcaactaaatgggagaattaaaagtaggggaaaaaatatcagtcacaggtattctgcttctggaaggcctctaattctatttcctgtttgacatattattttattcccattttctctaaatgtaatatagtaacttgccataataaacggttctctaatttgccacttttgtgattggcattttcagatttttcaaggacgctattggtcgttccttcatatgttgcaaaaataaacggaaaaactgaaccacatgtcattgttgggcggaattttctgaatttgtcttgaagccaagagaatttatttgactgtctggggagtatcgaggcagatctcttgttctcaaacagacaccaaagttgcttgaacaaatggttcgcgttagctggagaaagacactgaatggaaaccatgtgcctctgaaccttgtggtttcaagttgaaccacaagcagtgagaagagctgtcagtctctagtcttgatttcggccatactcacggggaagagaaaaactgtcagtgccacctcttatgttgtcttaataaagagacctgtgagctcgtgcagtacagactgtctctgggtgaagagtaagagacagaatctcaagaagcttccagtgggatgtaataaagacacatgatttttctctatggacatccacacatggtaaaggtagcaaatcaaggcctttctgaggagcagaaacaacccagggaggctaacgaacataaaaatctggcatcctcttatagctatcataaaggtgaagaaaaacatcctagaggaattagctttgagacccaagacggttaaggttgctagaacagaaaaacaagaaagacaaatttttaagtgttaccatttatcaaactccaacagcaataagggaatgttataaaggaatattaagtgctattttatatcacaatggcaaaagaatcgtttaactacatgtaagtatggcttcctcaatgaatataggcatgccttcacctagccatttagatgatggaatcagtttctgaaaaatggaataaggtttgatgttgagttatctagcaactagaaggaatagtgaaaacattttttgcttcctcttctgtgccttctattaaaaacctctttgcctcagactgatttactttaagcagctaacacttctaccagtttgaagaaaaggataaagaataagaaataaattgtaactatttactacagttaatattaaactttcaagtattctacaaatgtacaatactggtgcaggatgttgacattagtgggcagggagcatatgggagatctctgtactttcctctttcttttgaggtgaatctaaaactgctctaaaaatagtcttgaaaaaagtgctgggcaaggcgtggtggctcatgcatgcaaccccaggactttgggagaccaaggtaggtggatcatctgcggtcaggggttcaagaccagtctggccaatatggtgaaaccccatctctactaaaaatacaaaaattagccaggcttggtggtggacatctgttatcccagctactcgagaggctgaggcaggagaattgcttgaatctgggaggtggaggtggcagtgagccaagatcatgccattgcactccagcctgggcaacagaatgagactctgtctcaaaaaaaagaaaggaaaaaagtgctaaatgtattattgtgatatacaggaggctaaaatcaagtataacttgaaaagtaggccaagtgactcatattaaaaatgaataaatgcgtacccacaaaaatttaaaaaaaatttaaaatgtataaaatgaataaatataaatgtaaacataatatataattacatatagcacacaaacatatagcaatagagaaagacgagtatgtgtatactcacacacacacacatttctacaatttaatatagtgatttatacctagaatcaagcagcttttgggggacttggaggttttataatacagaagagataaactgcaattacttttgaccattttgctcatctttttcttttccttttcttttttttgtttagatggagtttttttgctcttgttgcccaggctggggtacaacagcatgatctcagttcactgcgacctccacctcctggattcaagaaattctcttgcctcacttcccaagtggctgggatcacaggcatgcgccaccacacctggctaattttgtatttttagtagatggggttgctccatgttggtcaggctggtctcaaactcctgacctcaggtgatccgctggccttggcctcccaaagtgctaggattataggattataggattataggtgtgagccaccgcgcccggccttgctcatctttttctaagagattcagtagcccaagctaacatagatttcattctgtttcagcaaaaaatatctgtgacatgctcatgaactgtccttcccagctgtttaccattcacctctatttttcattcatctctgttttctgttcacttctgtaccatttctttctgttttcctgagaaatgagcccactgagataaagactggcccaacaagaacactgaaaagcattccttaaggtgaaaaatagaaaaaaaatccatttctgaagttctttttagacttacagttttgagcattggttcacaaatttgcctgcaaatagagtcaatagaaatttttaaaaatagactcaaaacagagccaattataatatgttgatgagacccagttatcagtacatgtatttcctgggtgaaaaatatcttaaaattacagcattaagttatgttatcatttgaatagaattattttacacgagctaaatgacattaactctatagttttcaggtaaatcatgagaacttgtctaatcatcaattggatgttgtgccatctgtgtactttgatcaataagataacctacatgtgtacgttacctttaatttggtacattttaagaaataaagacatttctgataattttaatgatcaaaaaagcaaaatgaggtacaccatcattccaaaacagattccaaggcatcgaagtatttgttcaaataaagaaatgaactaaaacattacacatatcagactccaaaagggtcaacaacaacccataagctcaatagacccatcagctcagaactaattttgagcccatgtgtcagtcagtatttattaaccacctactatgtgtcaagcacatgtggaatttggcagtctatattccaatgctacagaatgttcttggaatggctaactcatttcaagacctatgttgactataatgtctgatcacttgtaaattctccaaatatctacatcatagtggtaagcgctgtataagcaagacattctcaaacaccatcacatattatccctatttaattgaccaaattgcaaacattcagcgtgtttacatttgatgtacgttacatgatataatgctgaatgtgtcaattgtgctcatgattaatgtaagttgaacgttactattataatatctaattttctgaaatgctaaggtaaaaattttcctattttaacatttctgaaattaagatgtatcttatcattgagtatagactgggtatggcttatatttactcttccttccatcagcctctcccaacctaaaaactaacattacattaaattgatatcttagagttgaagactgtttagaagaaagaaatacaggagcttccctaagtagttcaataaccctatgtatacatcattcttctaaagtaggggaaggagaagataaaaacaaagatcatcaatgttcagtctggctgatagacaaagcctaagtattattgcagaatatcatagtccatattatcaatttccagcagatggcatctcacactgttaagttagtcattgaggagcctatgggatgtccttgcttggataacacatggaactccaaattgtgcttgtgtttcatgagagtacatttgccagcacagtcacctagaatgagaatttctgtaactagcctcagcatgtggtcactaagattgcccacaagcatttagtattttcagcagaaccaaagcatagtgcacattttaatggcagtgactcctgttttagaacagtctgcacaacataattgtagggcaaggtgggaattatgagtcttaaacaagtcttgtaggtggggataacatgtgtattaaaataaccaaaaccattggctctgcttttctgcagataagcctcacacagctatgattcacagcactgtacagctgcatctttctggagaaaatcttgcagtatttaactgtgccttctgagatatattcaatttttccacttttattaaaatttccattatgataatatttgttttcagtacttcaatgaataattttaaaacgcatattaacatatgaatctttgcatcctaggcaaacttgagaaccaatgttcaaaacagtagggttaacaggaacttcagaaattgatttctttcctatttttccccttagattcttttcagtgctcttgatgggacagtatctatctgagtgagctgatttcttcaggaaacagaattaaatggcacagagttaaatggtacagaggtgaacagaagacagaggtgaatggaaaaccgaagtgaagggtaatttgtgagcatctcacagatatttctgctaaagcagaatgagatctatactacctcaggcaatgaatgtcctggaaaaatcctgggtaaaatgttcaaaagtaatttcagtttatctcatgttgtctaacagtcacttgaagacgaaagagaaatttcatgcggcaatagctaagcatggcttttttttttacaccgtattttattagactgtggaatcttcaccttgttcttagtcaaattgttcaagataactctttctcagcactctattttttcttaaatgtcaactaattatgctaacaagcatatcaacaagaatatataaaccctcattttgttcaattaacactaaatcagcaactgatttcagtgaaatagtggtttcaagatgaaaggacgcatttgagctacacgatgtctttagcttgatcgaaattcataaaagctcctaacatcaaaggggagaaataagatcacattttaagataatacaattctaagttatattttttaagttgaaatgacatcataaaaattgtgcctaacaaaatgctaactgaatgtcccgaagaacagaaacaaaagcagttcgcattggaagctattttagataagaagttttgatgctataatgaagaaaaaaatcaagtaaattgcttcttttggaagagataacaaaatttgtcacctgaataagtgtgggaattgaaataaaacctataaatgagtccattttgacagaatgctggtatcaaaactctacaatgaattaccaattctattcaaatgataacataatgctgtaattttaagatattttttaccgaggaaatacatgtactgataactgggtctaatccaccaattagataatagataaaaaaatgctgacttgtggttcgcatgagctgaaaaaaaaggacatttttattgaaatgtctagagtgtcgttgtaaatgtaggtctgaagttcaagagaagttggaaataagctttatccaagagtcttccatgcagaaataagagtttaaaactctggaatgggaaaatttctgagatagagagtatagagaaagaaatggagagtaatgggaaccactgggtaatgaaacttgggttagataatcattttatctgcctttggctcttctataatgcatatgactaccatttctgtagagtgaggccaactatagtacgggtgaatttaataataaattataagaaaaatgttccaccattgtattcacattacatgagtgtgagcatcccttgcacatccctagtactccctaaaaactgaaggagaaactaattataatgtatttatttgtattgactatgaaacgttttgttccccaaatgcttgattttctctcttccttatcaatcagtgatcaaattcttctaaagataaaataaagattgctttatgttttatattaaacagaaactagtgtaactctgcctaattaaatggctcctatctaatccttcctagtcagttctggcaaaattaaaaatttagaatattgaacaaatgaatagtcttcctacgtagtatttttctatttcagctacagccaatgaaaatgtacaaactggattaactaaaggagagatgattatctgtcttttaaagcagtaatgtttaggattacctagggatgtaagtaataagtagtccctgtcaatcaggaggaaaaaaacttcagtcttttttattcccaaatggagccccaaaatgactggccataagcaaaatggcactgtgtgcttctttgttccccaccctcaactccctccttccattctgacccttctcctctactccacaccatcaaaaacctgctcccatatctcatattcacactacaaaatacatgaaagtttttatgcaaagttcaccagggtgggcagagaggatggggagaggcatagttgaatcttatcttggataaaatcaaattaaaaacactgaacactagtggggagatttgtagcaactacccatattaagaatgtttgggcatggagagaggttcaagaaaatcttgtagagtttcattgagttagactgggcaaaatagggatgaaggcattgtttggcagacagcaaacaaaggaggaagcagaagatttcaaacctaattttgcaaatgatttggggaagagatatgtcagtctgcactcactatagtatttcccccacggtttattttataatccactgagagcagattgtttttaaaatatctgttatatactagttaccttttaaatgtttaccctttgaaggactgtgatgctgttcctaatttacatttatgattattctgtcatcatttatgtaaaattgactaagagggtgttttcaggaatctactggaaaccatgagcaatgtaaattgccaaggtgccagaaatgtaggagggctaattctatgaccttaccattagtactttatatctgctctatttggacaaacttatggaaggaaatatactttacttttccatagaagaaattaaacactcgtgcattaatatgtcacatacaggagttcaatgcctgcactgtagttccaccacatattaacgggtgattccactctctgagcaaagccgactgcagacagagttttcttcctctcttgtcaaacatcccctacctgaggcaccaggatcttgttcagcacttgagtccagaaacagcaaattcaatctagctgtggcaggccgagggtaaattggaatgccaactctagaccgggattcaaaaccacgagcctctggaaataaagcttggacttggagaaatgacaccaacctcaagccaagaaatctcacccagtttgtttaacagttttcagtgcacagtgaatatagataaccactaacattactcctgttttagtttaaagcatatccgactaagaacttaatgtaaggtgccataagaatgaaaacatcacactcttctctgggttctcagtctttgagatattttggcggtcacctgattgcaaaatgtagcagcaactttcttttctggtgtgctaagatagttttatctcatttttctacctgtcaagtgctagtttcatgcattagctggagctacaataggaaaataaaatggacactgcagatattctataaatatatctaagtctatgtctttctatctacttatctctatcttttggtctacctattgtcggtctgtttgtctatctgttcatgtatgtatgtatgtatgtatgtatgtatctatctatctatctatctatctatctatctatctatcaattaatcatctatctcttcagatcctcactacaccatcatcatctctggctcttcagaaatccccccaaagtatcagagactggcagaacaggagtcaaaccacacctcagacctgacaaccctggattcatttcctcatttttctatacctcttccatcctgcttcaggaaagccatcccaagctctcactttattcattgtaaaatatgtagtgtggaaattcagaaagataatgagatataatgaagttcactggtgtcttagaaaacatttttaaaatcttatcaaaacttgaaattctatgtgaaatcagtgtttatttgtccaaaaaagattttagccacactagtcatgaaatggcttgtctatttgtgtgagtgtcatataaataggcttcattcattttttttttttgaatagacataacttggaattctggattgttgggaagaaaacactatttgactcaggtggggtacagttgaatgatgacagccatagagatgatattgatgatgatgatgatatctatttgttaggtgttcagtctgtgccaagaatgatgttgagctttacagtgtattattttaattaattgaacattctaaaagttgatcctatacactttttaaatttcctctattaactgccaacactcagcttctgaagccagtaagggatgccatatcaactcatcatctgttttattctcataccttaatgaatgatttaccttcattcagttggtggacacaagttacaaccagtggcagcactcattaatttgcggagccactggaccaaaggaagaactaaccaaattaaaatggtaaacatttcacacttaacaagcaggataatgaattacttacttatgtcctcattagctacagtatggaaacttgccaggccgtgataagcttcataaataatcttttattttttattttggcatttagtattcttggtttttttttttgaaggcaataatgttgcctgaagataagacagggaacgtaccattatttaataaattctagctgaatcttgtggattgttgtcatgttcacaatctatacttgttgtttattttcattccattcttcaaaaaatattatttattgacagaaaaaaatatgtatttgttgtgtacaacatgatgttttgaagtatacatacagtgtgaaatgggtaaacctagttagttaacatatatattacttcacatagtcaccatttttgtagtcagaacacgtaacattcattctcttagcatttttcaagaatattgattgccattagctgtagttatcatgctgtataatagatctcttgaacttatttttttctgcctaattttgtaatttcctattttttcacaaacatttcctcaaccactgctctcaaccaccccagtctctggtcacttccagtctactctttccttctataacatcaactgttttagattccacacatgagtgagatcacatggtattggcttttctgtgcctggcttacttcacttaacataatgttctccaggttcaaccatgttgtcacaaatgacagaatttccttcatttttatggctgaatagtactccattttgtatatataccacatttcttaaacccattcatctgttgatggacacacattgattccatatcttggctactgtgaatagtgctgcaacaaacatgagggttcagatatctcttctacatactgacttcatttcttttgaatatacactgagtagtgggattcctgaatcatgtgtagttctatttttaattctaattatttatatttattgagcacctgtgtagatgacactatactaagtaattcaagtatgatatctctttggaaagcacagaacccctgtgttataggcattgctgtcatcctctccattttgcaaatggcaacaagagatacttagtcatttagtaagatacagctagcgaagagctgggatgggaactcgggctgtatttgccttcctaagggcagggtttccacagctcataagaaatgaaggaagtttgaaaactcctggtgttgaggaggatatagtaacacttctgggctcctctttttccaaacaggtttgtctcttgttcagtatagttctgtcatacttttccaactactcaaacaatcttcacagagggaggcccaacgcagccattcctccaaaatacatttatacatttcctttaacaagtttgcctacgatggtagatcatttgtatgtttttttcttttttttttttttcttttgagaccgagttttgctcttattgcccaggctagagtgcagtggcacaacctcggctcactgcaacttctgccttccagtttcaagcaattctcctgcctcagcctcccaagtcgctgggattacaggcacctgccaccatgcccatctaatttttttgtatctttagtagagatggggtttcgccatattggtcaggctggtctcaaactgctgacctcgtcatctacccacctcagcctcccaaggtgctggcattacaggcatgagccactgtgccaggccctgtgtttttaactttcttgagtgttccagtaagttaattagaaagtccagcatgctccataagcacggtgttggattgttatctctctttagcattaattaagcacatatattcagcatacagaaaggggctttcatatctatgagtcaatgcaattaaatctaccagtcatacatgaaagacattgtctttgaaccactctttcacgggcttgcaatgaaacattgatgcattctgaaattgcataccacaggtatttaaactgtgaaacctatttgacagtatgcttatttcacatgcaacagtgatactttgcattcatcatcattaggctacataattggaattactttttgatttggcatagtggggcatggtttgcagcatttagttaaacttaccactacttctaatgattaataacaggtataagcaagatggattttcagagtaatgctcatctactgtgttagtagaatagattaaatttaactgctttgtggggacattgaccccaaaacttgcttcaattagtgtatgcctctagctatctaaactagctgggcacccaggtattactaatctattgctttggcttttgtttgttttaatattattttttaatgggtaaatgtagagatatatacatattttttattttactttaagttctgggatacatatgcagaacatgcaggtttgttacatatttatacatgtgccatggtgttttgctgcacctatcaatatttttaacaagccattgacttgctcttttttatgaccatcacatgctttaaaaatgggacagttggccaggcgcagtggctcacgcctgtaatcccagcactttgggaggccgagatgggcagatcacctgaggtcaggagttcaagaccagcctggccaacatggtggattatctactaaaaatacaaaaattagccaggcacgatagcgggcacctgtagtcccagctactcaggaggctgaggcaggagaatcgcttgaacccaggaggtggaggttgcagtgagctgagatcgcactactggactccagcatggacaagagcgagactcatccagaaaaaaaaaaaggagacagtcaatagcatcatctgtataaaatcttaagcataaagcagttttctaaaggagaaatattaatcaaacatctaaagcagggcattttattcaaccaccacaagaattaaaaacagcaaataatgacggagcacctacaagaaacatccaaggtagttctttaagaattcagtttatctttttctttctgtctatggaactgtgaagtacaagggcagagattcgctagaggtaattttctgtggcactggtcacttgcaagtttgacatgccttcaaaatgggaaaataccaaaatggttgtttggttttcctgaaggctacaaaaaaaagggtgtttctacaactggataaatgatcatttctatttttcatggaaaagtaaatccaataaaacagagtaagtatctcattcaccaaacccattcctggtgcatctatgtgagtaaaactctaagtcactacagttagtgggctttggacagacgggaaggggagaagggaaataaatgaaattggagattaggaagtaacaaaagaagagaaataaaaaccaggcctctgtaacttttgatcactgttaaacaaggcaggatccacaattataaagggaagcaaatctcagagaaatgtgagggtgacacgtctgtactaaaaactgagtaatttcccatggaacaaaaaagggaaagtttattttactatgaaataatgtactcacttggctgacttgccagcaaagcaacagaaaaactagacaatccatgtctgctctaggaataagatattggggacgttttctaagcagaagaagcaggtctgaacctaaaccccttctgaaactatcttcaaatattgtgaagagcaatctacctagggacctcagagccaacagttacttttccctcaaaagtgctcaaccttaaaacaacttcttaaattcaagcatgtttgtggacagaacttgctttatgaataattgtagaagacaacatcgatttcacctggtatgatctgaattcaagagtcctttctggcagggcatggtggctcgtgcctgtaatcccagcacattgggaggccaaggtgggtggatcaggagatcaagagatcaagaccgtcctggccaacatggtgaaaccccatctctactaaaaacacaaaaattagctgggcatggtggcatgcgcctgtcatcacagctactcaggaggctgaggcaggagaatctcttgaacccgggaggcagaatttgcagtgagccaagatcgggccactgcactccagcctggtgacagagcgagactctgtctcaaaaaaaacagggtcctccccataaagattcttccacctttaacatatattctctaatctgagttctttttttaaatttttttttattatactttaagttctggggtacatgtgcacaacgtgcaggtttgttacataggtatacatgtgccatgttgatttgctgcacccatcaactcgtcatttatattaggtatttctcctaatgctatccctcccccagtcccccacctcccaacaggcgctggtgtgtgatgttcccctccctgtgcccatgtgttctcactgttcaactcccacctatgagtgagaacatgcggtgtttggttttctgcccttgtgatagtttgctgagactctaaatttctatccattgataatttgttggttttttaaaaatcctttgttttctctagaaagttcaacttaaaatggattcacttaggaggaaaacacagttgctagctgagcatttcaatgagttgccaagatgaaagctggctgagtacagccccatgagaaaatgttatccaagtaggttttgccaagacgaagagaaggatatgtccaaatcagaagcaggaagttctaagaggagctctaagtgcgacaatatctccacaattagttggtggaggaattagcagatttttttaaaggaggccacttcctaattagtttatatgactcagagcatcgccttctaactcccttctctagatgtctcatagactgaccaatgatttctcaataatgtatttacactactttctctatggacagttaatcacaagctcattgtaaataggtcattgtgactccaaccttcttccaggtatgtttctagttcagagtatgggacagcatacctgggagtacctgacttgtggaaatctttggaattctttcgaggccacaaatgatgtgaagacttttcatgccttgggaaaagccaacgcacttggagagacaggatgctgaaatgggaagtgtgcattcaagatgagactcataatttgtaatggggcgatgtctacacatgaaccaggttctgttgttcatattttttggaatcttcagctcccaatctttgcagggcttatggtgaggaccaccccagtctgaaactagaaattgtgggtagcccagaactacatttacacagtacctttacaactacctctttattgagatttcttggttctgctaggctaagccccagagatctggggcaatgaggtacaattctcttcctgtactagaaataagagatacagacagagctactcagtgggaaaaaaagaaagtttgttaatttaaaaaagaaagcagactcattaattttggctgattattttagtgacattgtttctatgaattcgttttttcagtggtgaaaattgattttctatgaaccatccatacccagatcacaaaagaaattgggcaagttgattttctggagttagaaaaaaaatgaagctttgtaaatgcaaagctgaagatgccatttagaggtcaagccagtaaccttggctgcattagcaccatgctctaaaccaactgagttgacggggatatttcaaagaaataggaaattgaattaatgggtacattccattctttagtaccaataaaagcctgtgtaagttgaaatagaagggattctagcattgtcactaccaatagtgtgatattaggcatacaccccaatatttctggtttttttttttttttttttgagacagagcctcactctgtcgcccaggctggagtgcagtggcacgatctcggctcactgcaagctccgcctcccaggttcacgtcattctcctgcctcagcctcctgagtagctgggactacaggcgtctgccaccatgcccggctaatctttttgtatttttagtagagaaggggtttcaccgtgttagccaggatggtctcaaactcctgaccttgtgatccgcctgcctcagcctcccaaagtgctgggattacaggcgtgagccaccacgcccggcctctggctctatttcaatgtcagtaatatattgatattattaattagcctctgctgagatgtagggaggcagagaagagagaaattgcgggggcgggggggaaaggaaattctaaaatataaatcataaatctttagaagaaaatcattatgcaaattccttcgccatcaccattgttttaactgttatcacctgcgattcacccaactggcagactttctgtaacctttttacaaaactgagcattttcccaaattcctgaaactcacaggaataaaaacaaattggttaacaaatttattacttaaaaatattgaaaggaaaattgcacaaaaagatggtttgagtttgttttcttcttcagttgtgttgcaaatagttcccccaatgaaaccatggaatttcctccagtctgttccccattacctctgtgggaaaattgtgaaaaatcaatctgttttctgcataactgtatacatcccattatttgaggaatgtcaaaagcaaaccccaatgactgacaatatcaatcttttccctctattttccaagtttaatttcagcagtagttacaaagcagaaaggaaagtgcaggctgaatatcattataccccaggcaattgcagattttaagaagaatttatataaaacaggagggtgtattctctttatagctgattatatctttgaccttgagagtcacataagcttcctatgactatgagatttttcaaatgtcagcgaagaatggggcatggggcaggcagaacacaatgcctttcctctagttgacagtgaaaatgtagataatgccatgccaaggttaaaatttttgaaagaaaaaaataaaaagattctagagaaatgtaatgattggtaacatttgatgtaatcctataaaagagttagggctcagggatttattatgtcttctgtcttaaacatttattgccgcaaaggagctttggggtgagattttcttttttttttttaagacaagcttgtcatgaaagcctaattttgctaattttatataacttttttcaaaatattttatttataaagattttattagatggttttatatttttgtaagaaaatataaatactgggaacttcatggtgtttgggaagcaagagacgtaaaagaaagaaaaaaattcaatatagtttcactcggaggatatccaccacatgacttttttttttccttgaagttaatgttttcctctaataattttgttttctcactatctctcatctcattcttccagggaaacaagagagaaaacctctggccttagctgcctcttcacaaaatgaaccaaagccttttgaggcgattactatttttcaaaccactctggaatccttacctatgttcttatattctggtcatgaaggaagatggctacaacatttatagtagagtaacaaaattgggcatttcaattttcgagccagagggtctccatttagtcatggtgctgctttctatgatgtatatccaaaccaattactttgagattcttacaggataatgtatattcaattttcctcaaagtgtacatcattccacattattaaactatgagaagcctaaatagctctgaactaggtgtttctatgcctaagtgtgcttccagatcatccataatctccttatgcacttagacaagctattgaacctctctgataccatatttccctatctatataagggagatgatcatcctgctttccaaaacgtatcactgtgagcactaaaagagataatttgttcgtaaaacttagtacttgagcacatggtaagtattcaataaatgctagatgaaaatatacagttagaatataagtttatagttattttcatctgacatttattgaatggtctgggaggatcccttggcttccttctgttgacactctaaattccaatgtctggacaggtagggcattagcagaaatcatacaaaatggaatacaaaattcactattgatcaaccatgttacatattttaactttgataatcgtctctggaagcaaaagtctcaactagaaggctattggagacccttagattctatgcaaagcaaaatgacctcatttcatttatgttagggaaaaaaaaccctctctgagtgcatggtatttccttttcattaaagatgattctttcagataacatgcttttccagactcaaactatcaaaagtacactggagatgtcatcagcaagatggacttcgataaatttaaatcaaaagaaaaaaatgtttttgctctgcccttttagcctttccctatccccaagtctgaagaacagtgacctttccagctggggcagggacagtggttttggtggttgatgagtggaatctgagatctgtcataaacctccatcatcatgcagctgtgggagggatcaccccactcctatgcagcacatgggctttctaaataatctttccaccagccctagaccttagcacaaagggagcttttcttcacctcgtctaagggagtcactgttctcaggttaaagtgttggaccagattaactagcagggtccccaactgccaaactatgcacagcataatgaatgggcaacaggaaaaagtttgattctccatttctataaacaccatttctttttggcatccattctacaaattccgctaagcgtggacctctctgcagagatataactatggagcatatccacaaaacgctctatgcatagctatggaggtgtgttcattgtacccacacttccctagaacaccatgaatttaagcctttcacttctttgctatcttgatgtttcattttactttcctgtgcaagactagccctcctctcttttcctctctttcctttcctttgttttttcttagatcatgtaaaactgtaaaaataaaacaaaagagaaacacatttgcctaattttcaagtaggaaggagactagcctcaagacagggagactcccttacagccaagatgactgacaaattcttgtggctttctccaaaagtcaaaccaaaatccaaccagcagccaggcttcgttctggcaaccttgctttgcctggaaatgagtgcaatcatatcctaatagctatttggataattgttcatatgcgtgatctgccaactaatgttggaaacaagtccttattacaaatatagcatgcagtctaatctggaatatattaaaatgtgatttctgtagatgcctatttctaaactggaataataatgaaaccatttatcacatttgcttttaaggagaagaacatttaaagtacaatggtaatctgtaaatgtgtgaatgtagacttactttttttaatacttaaatttttaaaaatcttactattttactcagaagtcctatcttctgaatcagtcttgggctaaagaagaattttgtcttgtttttctaacagatgaccataatataaatgcttgcatataaaagttaacagtgatacattttaaccccccatattggaaataagttgaatgactacatgaactcaagataattgtggttggtgatgcatggtagacaataagagggagataagtctacttctcagaaatctagaaccaaaaggcagtcagaaacaaaactcccaaagattcctcactttgagctaaaacactgcaagctgaactgccgtagtggggatctttagttcttcccatagatatagattagaaggcattttgctgtactttcataaagaggcactggggcacagagaaagaacaggggtttggacataagacagcctgagcttgaattccagtgtgccacttacaagaggggaaaatcatagagaacgcacatcctttttctgagcctcaacgtccccatcattgaaataggaataataaaactatttcaaagcattgttttgatgactaaataaaataggtatgactaaatagaataggcataggtaatgtgaccagcacaaactatgcatctgatgaaccgaatgacagtgctgctttgcagagacagtgtaatgtggtgttacgagcatggacaatagtgccatatttgatttcacgtatcccagtatgaaatctttctaatggtgtagtcatgaacgaggtgtccaacttctctgtggctcagttttttcatctgtcagatgggggataaaaatattacatacctcaaagggttgctgtcagaagttagtgagttaataatataaagattttaaaacaaattctggctcaataagggttcaagaaagctatcgcttgtgttgttattagtccatttgggatagaaaaagccagctcccagaagctatctccactcctggttcagcctattttcttcttctttgtcttttttctcctttcctttcacctttttcacctgtttcttcctggaaataaagggtacatacccacgttcaggctttacttttctgaggatctaccttgcatgaggcaggaagaaggaaagtagaaagcgactgtgagttacagtcaggggaagttggtgttttctttcctcaaagataatgaaacatgtttccgtttgtcagtgtcaattagttccataaactgattcgttctacatttaataaacaactgttgaatggtgctacatgcaaggaactgtactaggcacaatgaagatgaaatggtgatgatgtccatagtaagactctttcccttctgacttcccacgcacaggaagtaacaaatagatgttaggaagaggagttggttattttcctctgcttattggtgtaatcaacatgatcaggtgcttctaattactgtcgctttgggagaatgaatggtaaataatccatatcttaatacagtctctctccgtatcctcagggaattgtttccaggaccctgcatactcaagttccacagttggttctagcaaaagtcatatctgtgggttttgtatccagtgaatactgtatttttccatccatgttggttgcagaggcagaacccatggatagggagggccgactgtattcactggaaaaaaaaaatccacagataagttgacttgttcaattcaaaccagcgttgttcaagggttggctgtaaaatgatgaagaaaagtacaactttgattaacagagccaaaaacaaaatggacttcatggttcagttctaatgtagaaggtttgaatttgctctacagccctcaagtggcagaaatggccttttctgatttttccatatgaaattatctctccttcaagctcctcttaacaggatagaaagtaaatggtaccggtcaccatagaggagccctgttacctctctagggtagtataaaagtcctggagtgatccatagtgcagaaaaaactatgggaaaggaccagcagtctgggtccatcatgggaatctttgagaaacaaaatccaaagtgggctgtacttgcggaccccagggttcacaggcaactttattagaaatcctcccagttttcaagatactgcatagaaggagtgcagtagacatgtctctaccacttacataactggccatcctgttcctcctcattttggggtctgcaacctgggctaagtcacctccagcaccagcctcatgcctgctctcttagtgaccaacccagatggatccagctcagttatcctcagctccaaagagaatcctgggcctgaggatatgttccaggtgcctgctcacttctgttattgaaataaacaagagttaaaatccccaggagtgagtcaagatattcaaacaagaatataaagacttagcattcagacccatggggaaaaggaaaaatattacattttttgtcctttcaaatctgctacaacaaaaagaaacaaaatttaatatctcatgagtgaatcctgtcatactttgaaaaaaaatctacagaaatgtatcctgcagcagcaatatgtattcacaaaggcatcccagggtctgtgtttcttttctagaaactaagcttaatttttgtcccataaaatcgagagaagggagctggtttatggttttatgctgaatctgcattggaactagagcaacctctattgagctttcagggctcagccttaatgatacctgatatgtacaattgttcattaaccccacacgaggtttcatatgctcagtagcatgtatcagtttagttaattattttggataagacttgtttaagtatgtgcctttccgttttatgtaattttgagaataaacaccctttcttattgttttgtgatcccaatgtgttccaaggttagttgatgcaggtaccaggacatctgcgaacaactgttcctttctcatagattcagtaagtttcagatggatgaataaattaatgaaatgtggacaaatatgttaaaataacatgcgggcataacaagacacagtgagggacaaacccagcatttccccagaatgtcagaggaacaattcaattgaataaatgtattttgaacacttcctacatgcaaaacattgggcaaggatcgtgaaaaatacacagagatgaatgagacttgccatggcccttggaaaatcttcatcgtgccaatggagatagctgtgggtgttgcagtacctcttatgctcggcttcatgccctcttggcctactgttttactccagccttatggagccagttatctgcagatgtccttgtacctgcatcaactaagcttcattttcttccctaggatttctcctctgtgcactgtgagatgtctgagcaatgtgctcagccatggtgacacaggcagaaaccaggatatgcaagtgaacaccccatatgacaactccacaaatgggagaagggaatcaacagagacattcctttcttctgtcgctcaggttttgatcccattctacgcagctgcttagagggccacctcaagagatcaagctccagttggtccagtaggaatcagcttcctctctttcccctttattcatccctgcctctccttcaggtatcttaggatcacatctcaaaatgaactagccctagtctcaatctctgacatcatacaagcaacaaattagaaaatgagtatgctataaagataagcaaagagctgtaaatagaggaacttcgctctatttgataaccctttcgaaaggctccctcagcggctctgaacatctcttggttcatagctgcaatcccagtggcctatactaaccctgagcagtaactctgattcagttggaaaatataagtgatggtgcagataaaatttatcttttatcaataattctgggagtttctaaatttggagatttagaatatttggtggtataattaaaaactaaatgcaatccccctccccattagtggattaattcacgtcagtcctttattcaaaagttccaagtcctctcattagcaatagtcctgaaggtacaaaagagaggagggaaagaaaaggaatgcgaaaaaggaaaaaaggaaaagaaacaaaaagaaaagaaaagaaaaaagacactgctttagcttcttcgattttaatgttatttgatgaaatctgggactagggagactagaaacctgaaggaagctatattaaatgaagtgatcatttaaaaattggttgttggctgagcgcagtggctcatgcctgaaattccagcagtttgggaggccaaggtgtgtggatcacctgaggtcagggattcgagaccagcctggccaacatggggaaacctcatctctactaaaaaacaaacaaacaaaaaaaattagctgggcttagtggagggtgcctgtaatcccagctacttgggaggctgaggctggagaatcgcttgaacccaagaggcagaggttgcagtgacaggagatggtgccattgcactccagcctgggtgacaagagcaaaactccatctcaaaaaaaaaaaattgattgttgattctttaaattctaaataattcaagaaacaatatatctggaaaaaatataaatatatatgtaatacacacatatatctttatctaaaaatctagtctattttccacttcctttcccttgtgttggcatagtcaatcatggtaactctaagcaggtgcctaacaggttgttcatatattggcatggcagagtaagaagctggagtctgcagttggtagttcagattctgggaggtgctaattagtgcaaatgatcccaatgccagttaatcatcctaattaacattttcagtattctggaaactcagtccttggcaattccactttggatgccaattaattttacaagtcaatcactcttttttgtgaggatggaataaacatagaataaatgtttctatccatgtgaattatttgtattcgatttaaaaacgaaatatgaagccatacccattttcagagcactttacctgaaatcttctagcatttataaatatctgtctcatatgatggttctttctgggcatgccttattttgcttctctacttcatagtaaggttcatgtcccacacaattttggatcttcttcacactccctactctaccctataatctaatgtgattgcttgcatttagcatgcccttagtaaatggttgctaaaggaatgaacaaaacaatcaatgagtaactgagtaaataacaccttgaaagaataaaattgaggatgaggaattatctacaatagtccaggaatgccactgggctatgatcccttagtagcagcacacatgttgacatgtgtgctatgaataccattggttgtacacacattttctttaagatgtgctctttctacttcagcatgctctgtatgctgcagatgtgcagtggtagccatatttcaactctccaccttcacacctcccaccggtgttaacctcttttccccaggatttatgtctttttttattgttctgcctggagccatgccagatcctaggatcaaacttcccaaccttaccaaactcatgggtgaagggatggaaatcagacttggtagaaaggcctgtgcttctaatgtgggaaaggaaatggcttacttatctccatggaaacacatgcactttccaattgttgctgaataaatgaaagttgtgttcttaatccacagacctcaatttcaagcaaatctagcagtttttcatggccggcacactgagttttttttttttttttttttttttttttttgagacagagtcttgctctgttacccaggctggagtgcagtggcatggtctcagctcattgcaacctccacctcctgggttcaagggattctcctgtctcagtctcttgagtaggtgggattatagacacctgtcaccatgcccaactaatttcttgtatttttagtagagatggggttgcaccatgttggccaggctggtctcaaactcctgacctcatgatccgcccgcctcagcaaattgcattttaaatttcattttttaaaaattattgtttgttatttcatcttaccctctaaatgcataactcagtgacaatttcttctaaatggtttctgcagaatagtctggaagcactggattcttaaaagtatgaaattagttattaaaactgctttaggatttagttaacctttttgagaattattagaaacttcatcaaatacaacaataaagaccagaccttgagtctgcattattatttcaccaaatatatagccaggtacaaatgatttttgttttgaatgaccatgcttagatcctcaacaaaagacgggttgatggatgctgcaaaccaccatgacacgtgtatacctatgtaacaaaactgcacattctgtatgtgtaacccagaacttaaagtttaattttaaaaaaaagtttttgaaggatagtatatttaaattaagtcaatatttattaccacttactcggtttttaagaaagctgacagtggtgtcatatagaatggcaatgtacactataatcagctgtgggtcatatagaaaatacaaacatcaggatgtcgctcaagacacagtgaatcattgcttctgtgagttactagaacctctagactgaatgtagaacagcatgggaccgtatgtagtagagttaagaccacaggctttggagggcctccatcacttcttagtgatgtacccttgagcaaattacataaccctttggtgcatttttcttatctgtaaaatgatgatactaataatcaataaaactaaaacatttagaatagtccctagcatagaagtgcttaactcatgtcagctctttcttcatccctacttactatgtgtatgttcaataagctttacaggtgattctgatccaaagccagggttttaaaacggttatgtatgctaggcatggtggttcacacctttaatcccagtactgtgggaggccgaggcgggcggatcacgaagtcaggagttcaagaccagcctggccaacatagtgaaacccccatctctactaaaaatacaaagaaaaatattagccaggcgtggtggcaggcagctgtagtcccagctacttgggaggctgaggcaggagaatcccttgaacccaggaggtggaggttgcagtgagccgagataatgccactgcactccagcctgggtgacacagcaagactctgtgtcaataaataaatatatatataataaaaacataaaattggttatctagagctgcagtgtccagtttgatagtcactggcctcagggggctattgagcacttcaaatacattcaatataatgaataaactgaattttaaattttatttcatcttaatttcatgtctaatacttgattcagttatgagaaaacagcttgggtatgtgaatgtgtttttcaacagtacattttatggaatgaaaatacagacctagtattttcaaggaaatttaacacctgaattgagatgtgctgtaagtgtaaaatacacaccatattttaaagactcggcacaaaaaagtaaaatatctcactaatatttatattaattgcattttgaaatgatgatatttgggataaaataaaacatatttttgaaactaattgcactcatgtttttctattctttaatacagctgctagaacatttgatatcacatgtggcctgcattattgttaacagtcagtactgacctagaggatgccaggggctcatgagttagtgaataaactccaaaatctaattacctatttttccaaatccaaaatgtaaacccatcagtagaaacaaaattattaacctctgggaaaaaagattcaaaacataagatatataagccaataaaaaaattgtgtgtgtgtgtgcgtgtgtgtgtgtgtgtgtgtgcgtgtgtgtgtgtgtgttatatcactggggcgcagaaattttcagagaagagaatacaaggcattctgctgtcatgggcaagctatattaggaagctacttacagactggcttacaaagctgtgtcttacagtcaaatgagtcacagcttttaaactctccttctgcaatgcacgtaacccaccaaaaagaccaacattctcttgcccattaaaaaagactctctccttcgtgggaaattcaatgtgaacattaatacacatcccattctttattctccttgactgttctttgtcctcaaaccttggaaatagtatttacctcttgggatactgtgataattaactggcatagtgcctataaaacatgttcaacagtgcccggtgtagagtaggcattcaatataaattatttttataattagataattatttgacatcaatggtatcttaacaattacatcagcaagaatgtgtgtgtgtgtgtgagtgtgtgtgtgtgtgtgtgtgtgtgtgttttaaaggccaggcaaatgtgtaccatacaattagtctataagaagtgctttgaacatataaattatcagaagtcttgctgtttttgtcatagctccctcagggtccttggttcagaatcaggggactatagctctaaactacctgtttctttggtaaggtcattcttcttttagacacttaaagtatatattctgcagctgcctataggagctatgttttcaaatatcgatgcaactttctccaagatctttgaatgttggtaatttggaataaggttaattctttattgtctttcgtctaataaagtttagacataactaggataaaaatctgcccaagcgttttcccccccatcttaactaaccaaacatgagtgattataggaatataatataaagaaaaatagcatcatagttcattttcattaatttcataaaattctaggacacaataacaacttgaccaatacaaacccaggctgatcaactcatggatccttcctaataattccctgaaacttcttgtccttgggtgttgacaccttgaaactgttttttaaactgatgctcataaaataagagatttatagaaccaactgacgagtcaggtacaagctctgtcaggccctgaagaacagctttcaaacctccaacacaagactcagacttttctccttggagttgatctacagtctccttctgttattcactcctaggttgctgccaacctcagctggccaatcatgtttgtgggtatcaagtgatgccaagttgttttattatatggacgaatgcccattgactttaggttaagatcttgcagtcattttccttcatgacttaaaatgttttcaaacctgagttttctgagataaatggttaaagttgaaacctattaaatgttcatactcaatcagtgaacagatttgaacccagagataaatatacaaaatgataaagcacaatatctttgtataccttaagccagaggtgggcaaactatagcccacaggccaaattcagcataccacctgtttttataaggcttgcaacctaagaatagcttttacattttataaagggtcacatttgaaaaggttatagaagtaccaacataatattcttgattttgctttctttacagaaaaagtttgctgaccccagccttaaattataaaaaaaacatactttttgttgttctctgaatttgtttgctttttgccccaagattctatttttaaaattgtaattagtggtattccacatggtatggcatgtaaaaaaaaatcattctttgaaagttttgagggaacgaaaaatagttagtttgaaaaacttggtttatacattacctgaaaaatctatagtatacgaacctttgatttagagaaaagaaacatcccagaaaaatactgtattttacacgatctcattgcatatgatagtcaaactgatactagtgcctgaaacactggtacttaagttctctttttaatttctcatctcagcattctttacatgcagagcacatgcatgtctgttttgcatttcagtatgtagcatacttgatgagttttattcttttaatattttttggcaatggaaacaatagctttaaaatggttccacagaggtgaattgtccctggcttcacgaaataggtgtttgagtttctaatgcaacaataaagcaagaccaaagacccaataacaaacagctgagaggatcaataacccctgtgttttcagtccatgcttatttaaagtggtgcatggaaaaaaaaaaaaagtctctctatttatatctggaacttaatgaagtgaaattatcacagccgacaggcgctggtgttgtaattcagagacagggcttggcttagagggatctgcaggctgtttttattccaatttttaatttttttttagtgaaacttaatctcctaatcagttccaatttacatatttgctggtccttttttttccagcatgatttttagaggagtggtgttggaggcataaagcaattatttgattaaataattattcattgcaatgtgtcctgctctattcgaagcaagtggataagtggacacaataccaataaacttgtaagcacagagccagggacgacttctgtagccattcatagctgtctccattcccatatgcatcgcagacgtgtgtgtgtatatgggtgcatgtgtgtttttaacttgatccattctgtaaagttttgctcacactagctctcctttccagtcttaagggattaatatcctgctaaatgaagtgtttcaaatttgaaatttatttggggctaaatgaaataccaaatgcttctaatcatagtggaattgtgttccatcattaaatatcctcattctctacacgaataaacatgtcagtgaaattatcttcttgtgtgaaatgtcaaacccttaaatgtatatgttttccttcgaatgtcatttaaaattgggaatttcaaaaagattgatacacttcctttccagggttaacttttcctccttagttagatctggtagttattactgggggaagaccacaagtagagaatgagagggtacgaagaatatgaatacaataattaaatattatatgtgttattttcaccgttttctgaagtatcagcaattatgttgaagaatcttcaagaatctcaagtagattccttctagacaatcagaaattaagactagaatactttcttttctaactggaccacaggtttatattatcagtaaatcgaagagttgcagtttacttaacaggaggtagtattattcaaatctgaaaaaatcatcctaaattttcagtgttacacttgtccatttggtaagtgtttcctgagcatttgctagtgccggtagtgtactaacttctctgggaaaccaaaaaatgaaaagtaatcaaatatgaatactacccgaataaacatatcccagtaatattctagtcaaagatgacaaattcagaaacctaaagaaatctgaaaataccagatcatgttttatcagcagttgtcagaggaagtcattgatttttttaacaatgaaatgtgctcctgaaaagtatccttaatgtgattattctttatagggtatgttggtgtattaagtagagagatattgaaggtggccagggaagttagtaggatattttaataacataggcaagaaaaaagaaatctgagaatgtgataatagaagcagtgagaatacggaggaaaaagtagaatcaatataccgtacatcaaagcctttttaaaaaatagcaagagaagggcgggcacagtggcttacacctgtaatctcagcactttgggtggccgaggcgggcaaatcaccggaggttgggagttcgagaccagactgaccaacatggagaaatcccatctctactaaaaatgcaaaaaattagttgggtgtggtggcacgtgcctgtaatcccagctattcaggaggctgaggcaggagaactgcttgaacctgggaggcagaggttgcagtgagccaagatcacaccactgcactccagcctgggcaataacagcgaaaactccatctcaaaaaaaaaaaaaaaaaaaaaaaaaaaaaagcaagagataagtaaaataaaagatgtcagggctgtatttgtggaaagtgagtgatgagaaattcttatgggagaacgcttgagttcaacttgttttcatttttcactcaataactttcaatcaaattctatgtgagagttaggaagtactttttactttcctttgatcatcaatgctacaaaatggaaaccaactcaatggtaaagagtgtagattttggaataagaataacctaagttataatcccaatgtcattattcctcagtgtgtgcctttggctagcttatttgaacttccttatcctcaattttcttatttaaaagaaaaatgaaaagcatatctataggatgcatggagtaaatgaaacaatacatttaaaactacttaacacaatggccagaaaatacagttggtactcaggacagtactgaatgtgattgtcgttttagttgcttaggctgaggataatcagtgcaccgtgatctttaaagaccataccctataactatcttaagaaattgtttatgctttgagttgaaagaaaactttgaagtaaaaagggttaatcttcgtaccagtttttgctacaaattgatttaagaagcttatgaacatttgatacaaatcacatattattttctaaattgttttccctctatgctaattgaattaaaaccaaaaggtatttcttgatcatttgctgtatgctcagaagcatggcagtcaccatgggagatataaaaatatttttataagctctctttgtggttaagaatattacagtttagtcagagagataaaaattatgcccatgaaaccagaaagagatgttaaaataaaataaaagcaaacagttggaatattgcttcaaactcagttactatgagaattcagaatagggaagcaatggatcagctttaaccaaacagcaaagcccttgctttgtgaagctggaactgatttctggagaaaggatggactgattcctgacataagagtggatctgggcttaacagagagggagagagagataaagagagagacagagttcctttttcttgttgagcaaagaaatgagagtgggagatagtatgaagaaatcttgattatgaaagaagaggtatgttagaactaagaaaaaacacaggaagccaggtgaaatttactgatcaatgtcttcaaaagcagtgtacaagtttagacttgactcatgaattatcaatgtcaccaatttttaaactgttaaaaaactttgagtttctaagggcagggaattcaatagccgatgtattagtccattctcatgctgctaataaagacagggtaatttataaagaaggtttaatggactcaccgttccacatggctagggagatctcatgatcatggtggaaggtgaaggaagagaaaaggaacatcttacatggtggcaggcaagagagtgtgtgcaggggaagtgccctttataaaaccatcagatctcgtgagacttattcactatcatgagaatagcacaggaaaaaccagcccccatgattcaattacctcccactgagaccctcccatgacatgtaaggattatgggagttacaattcaagatgagatttgggtggggatgcagccaaaccatattggcagacaagggagtcaaagtctctgcctttgaaatatttacttctaatacaggattcaggtaaataaactctctctctctctctctggctctctctggctctgcctctctctccctcccaccacttctctctttctacacacacacacacacacatacacatacacgcatttttttttccaggaaaagtctcactgaagagggtgcatttgtgctgagaactaataaagagagagaaaaaggcatagtgaaaacttagggaatggagtattcaaagagagggaatcacaggtgcataggtgctttgaagtgagaatgagaatgtgctcagtatgtttgaaaaacagtaaaataaacactgttaacaagggcatactgagggaagggaagagtcataggagatgagcttgaagaggaaatcaaaggccaaatcacagagtcctgaagattatggtaagtatttggtattttattctattctaagtgtgatgaaagctattggatggcttgaatgttgtaagacatgaattgatttatgttttcataaagataacactggctgctatatagaataggttttataagagaaatgtgaatgctggaaacaaattagaagactactgaggctttaaaggagacagatgatggtcttatggatttggtacctggaatgagagtggagatatgaagagtttcatttcaggcctgcaaaattttaaatgcccattaggtatgcaagactgaatttgaggagaaatggaaaagattggggttggatgtataaaatttggagtcatcaaaatacagataacattaaagacccgagtctaaattaggtcaccaagggagtgagtactgacaaggtagagaagggcttcagggaatgagcctagggccattacaacatttagagtactagaagagaagaatccagcaaagaatatgaggcaagttaagcatagggggttccttaggatggtgacactattctgtgtaattctgtaatggtgaatcatgacaattgaatttttgaaatctgttagaattctattatagaaaaagccaagcttagtgcatgtaaattgaaaaaaaaggagtaatttaacccatttcccctttgtctccaaaatactgcactggcagttttattgttgttgctgttgttgttgttgttggaaatgggtttaagaggtcatggatcccaggatgagatgcagattgttacaaaaaaacataactgcattaaaaagtgtatatcatgaacacagggagaagaacaatacacaccacaccaggaccagtcaggaggtggggggcaagaggagagagacctttaggaaaatagctaatgcatgcagggcttaaaacatagatgacaggttgataggtgcagcaaaccaccatggcacatatatacttctgtaaaaaacctacacattttgcacttgtatccctgaacttaaagtaaaattttaaaaatatataaaaaataaaataaataaatgaataaataaaaagcacatggaacaacttcactgaaggatttgaggaaaagtgctagtctaataatctggaaatgaatggaatccataagaataaaagcaaagggaactgtacataagtattgtaccctagttgataaagttgttccccacaagaatacacgtaagcaattctgaaactattaaacatgtatactgaaattgaacaattaagatatgagtggtgaatggtgggaaacaggttattcacagttgcagtgggaggttacagacaagcaaaggcagatgaatagaataacccatgtagcaatggattcaagttggaaactttggtatgaactaatttgagcttaatatagatacagatgcatggatacaaaaatattatatatatatatatatatatatatatatatatatatatatatttacataggtgaggatacatacatatatttccttgctctgttagctgagagcatctggaggcaatggcaccagtatcaacaaccacacacaccacacagatcttactctctaaatcttttctccaatcaaacgtactagggtttggagaaatgactgtttctagggatgagacagggaatacagatgagcctaaagcattttgtcatatcacaaagtaagaaagtgctttttaaaaagcgaagataggagccagccaaagagctacctgcggcaatacctggaacaaattgggcaatgaagtgaacaacacagtgttagattacaaccacctgtgatgattaattttttctcattactattaccctaaacactttattccagatttcattaacagacccttggtcccctgaatatagagataagatgacccaaagtgagctacttatgaaactctggctacagtgattgaaccagttccagcttcatcctgagtgattcggaggatgtgactccatagcagcctgtggcctaatttcctgccacacagacactgatgtggggagcgggaggccaggtgagtttctatttccagtccttgggttgccctgcattttacagatcttcctttgcactggaataacttcttgaacactccactcaaatgctctttttgcttgaaaagagttgaaagtaaatgtttgtcttttttaactgaaatcatcctgacaaataagcccttctcagataaacccagggggcaagcatcatttctcatcttaacaaatctcttgacagaacttgacaggtttgatcattttctcatccccaaacactctcttccctgatcgtacctactcctcttggttttcttcctgcctcactgcctcactacccagtctttctcagtctttttcactcgctcacttgcttgctaactctcaaaaataaatttttattttgtaacagcttttagatttatagaaaagttgctgagatagcatagagaactcccatagaccccacaccaggtttctgcaaatgttaccatcttaccttagcatggaacattgatcaaaactaatgaaccaatgttgttacagtattattaacttaactccacattttattctgattctcttaggtttttttctttcttttctaggatcccacctatagcaccatattatatttagtcatcctaactctctaggctcctcttggttgtaacaatgtcttggactttcctcatttttgatgaccttggcagtttgatacttgccaggtattctgtggaatatccttctgacatttgcctcataataggactgggggtttgggaaggaaaaatcacaggggtaaattatcattttcactacatcacatcaagggtacacattgttaacatgaattagcactgctggttttaattgtagagtctttcgagttttcttactataaagttactccccttccccctctttccacattgaactctttggaatgaagtcattatgctcagcccacattaaaaaattggggtgtgatgctctacttttttgagggcagagtgtctacatgatttatttagaattctcctgcaagggagaaacttctacactcccacacttatttatttattcaatcatgtatttatatcaatgtggaatcatgaatatttcatactttgggttataatccaatatgatgttattcattttgttgcccaatttgttccagctttggacatgaggagctctttggctggcttttatctccattttccattctgcaaaagcacttcttgttttctgatacgatgagatgctttaggctcattttttgtccccaccttagaaagagtcatttctccaaggagcctgcctcagttccttttattggagaacagatctatttgatgcttctggttgttgatactagtgtcattccttatacttaagataatgcattgtagatttaaaaattgttcagagagatcttaaacgttctaatgttcttatcataaaaaagataggtatatgaagtgataaatatgttagtcatttctgattaaatatctatgcatgtgtatacgcatatatatctctctcagaacatcacattttatactatatacacaattttaatttgccaattatatcttaataaaactgaaaaggggggtgatatagaggtaataaacaactgcaaatatgttatatgcagatgtaaataaggtgtctagagactgtgggaatttcacctggggagattaacacatgagaaaggatggacagtgagaacagcaggtgagaaaagtcattcctatatttttctccctcaaatgtaaataaatctgtatcatacaactttatcaaatgcctccatcctctagaggcaatcatatttatggtattctctaatatacatcctcctctagagactgacccatctctaatttatttaaacaaatcatggcatttcctgtccctataccttgctatggttatttcagcccttccttgaatccctacactgacagctggggttgccaaataaaatacaaatgctgtctaatttaaatttcagataaacaatgaataactttagcatatgtatatcctaaatattgcatgggatataccttgtatgaataaaagtgtttgttctttatctaaaattcaaatttaactggttatcctgcattttattttgccggatctgaaaaccttactaataacttccatcttactctctaactttcatttacatactgttataggtgtttccaaatcacttagattttaacttcccattggaaaaaaaaatacgtattatacttctctttcctttactgcagaagatctgggaggaaagaagtccatagagtggttattataggataaccaaggcctgaaacagttgggtttaagataatgactgcagctccatccatgttcctgcaaaaaacatgatctcattgtttttatggctgcatagtattcaatggtgtatacgtgttacattatccactctgtcactgatggtcattcaggttgattccatgtctttacttttgcaaaaagtcctgcaatgaacatttgcatgcgtgtgtatccttagcaaactaatgcaggaacataaaaccaaataccgtatgttctcacttataagtgggagctaaatgatgagaactcatgaacacaaagaagggaacaacagacactggggtgtacttgaaggttctggataggaggaggggaggagcaggaaaaataactattgggtaccaggcttaatacctgggtgatgaaataatctgtacaacaacccccacttgagatgagttttcctatgtaacaaaccttaatgtgtacccaggacctaaaataaatcttaaaaaaaaaagataatgactgcaaaacagagatatgtagaggagctttactggcaggggtacattctagcagagcttggttacattctagcagaaaacagaattagactaagtattttcttttaactttagcactttatttaacaaatattgaacataaaaaacagagattatacaaatcactgatgaatgcactgttctgaataaaaagttgagcatgatactctccctgtttcccagaagcttaaaatatataccaatgtatgcatgtacatataaggcaaacttatgattgtccaaagaggtggtatcagtaaagttctagtgcagtggttctcagctgggggcaattttattcccctccccagggacacttggcaatatctggaggcatcttcaattgctgtaacagtgctactggaaacaagaggatggaaagggcaaaagatgctacatcttttttttattattattatacttcaagttctggagtacatgtgcagaatgtgcaggtttgttacataggtatacacatgccatggtggtttgctgcacccataacccatcatctacattaagtatttctcctaatgctatccctcccctagacccccacccaccgacaggccctggtgtgtgatattcccctccctgtgtccatgtgttctcattgttcaactcccacttatgagtgagaacatgcagtgtttggttttctgttcttgggttagtttgctgagaataatggtttccagcttcatccatgtccctgcaaaggacataaactcatcccttttatggctgcatagtatttcatggtgtatatgtgccagaatttcttcatccagtctatcattgatgggcatttgggttggttccaagtctttgctattgtaaacagtgctgcaataaatatacacatgcatatgtctttataatagaatgatttataatcctttgggtatatacactgaatcttacaaggcacaggacaaacaggtaggatgtccagacaaaaaagaacaattgttcaaaatgtccaattgcttaataatgtcacagttgagaaactgtgatcaggaacaacgaagtcaaaagaagcaatgcttctgcctgtggtgatcagaggaagcttctatatatgcatacggtggaaatgaagacagtgaacacggcatgagcaaatgcagcaaaacttaacatttgctgcaagaatggcacatggtctgattgttttgaagtcacggttgtgctggagaccagtggacattaacacagagagcaccttgggctagaattacggtgagctttgaatgtgaaactataaaactccagatttataagcattgcaactaagaatggtgatggagaatttggagtacaggacccatatatggcaaagatcagttcattaggaaatttagtttatattggggaacgtttgaaaaagtcactgataattttccacttggcttccaaaacagtgacgacaaaaatatggcagctaggcaatcttgactatgatcctagctgaaacaagttgcttgcctcaatcctgcatgtccccctataactgaagcaatggcgcatgaaagctaacctttatttttattttttgtttttgtattaacatcacaactttgttagctcattgttttaatccttcctcttcattccgtggtaaagtcacaggagtcccattttcctcttaagcaatgctgctgaattttacatgctcaaccagccccagaaaatgggatagaagaaaaaaccggatacattgagaatctatcttaagttctgtggttcagagagtttggaactgaacccagctattttggtattggggcttatttcaccttggcaaaacatggccttctgttttaaggtgggggggcagttgaaaagcttattaaaaagtctcaaaatgcttcttcaacatcaaatagctcctagaaaaatattttgatgagttaagtgtaaatgaatcagaaacatatggattacatttcctttagattacacatgggtttcaaaattaaggggaaaagtgctcagggcaaaatgcattttggattttattgaacccaaaatatttgagaaataactcaagacactcgaagaacccaaaatcctgccaggtttcccaatcccttgtgaaaagcaaattagattttaaaattcctttcgctttagtgatctatgatgttacatgaaattcagatgaaaaacttcttttctatatatgatttttaccctggatattttcacttacaactttggccaaaatctagacttgaagtgtactttagattggctaaattggctggatggctcagcctctctctgccctgcttagtgacaagaacatttgatttgtcccatgcacagtcatagaatcaagggattaatcaaagggcttcagatagcttcatagcaaatgataccaggcagtattcacaatttgccgttttgcatttagctttccactcattcattgggcattgatgaaaaccttttcattacttctcatttatcttaggctttgacagaccctacttctagattctatattttaaaaataaaaaggaagtcatgcctgtttattaactcagtcttttgcttatcccaatggcaaggccaaagtgtggctacagaagggtattagattttcaccagttcccgtcccctaaagccacagcctatgtaaaatcagcatgattgctaagcaaaaagctctacaacaactcccctaaccacacttctaatccagttttcattcctaggcctcacctatatgggattttgagagccataacaattattcctttatggctttactggacatattatttcttagcacctgctataatggtggcatggtagtgggtatgagagatgcaaatcaaatcaggcatggccgtgcatcttcaaggaacttcacacatacacaaaattctccaggtaggacaacagaatcagaaatatgtaggcttcaagagtatacagtgccaaagaagggaggcgtcaaataggaaaccgctgtctaaaattataacatggaactatataataggagttgtttaaatccaacttaagtgattctgtttggagcattttataacgaagtgaatttatagtgaactttgcctattttataagtctaacacatttttctccattcttcctctggcaagcttgccctggtaactcaagatccaacccaaatgtcatctccattgtgagagttcccatttccaccatggttgagtgaaatcttgtctctgaattgccaataaacattgaacatgttcttatttatatcatttttagcattgtgtttcaatttatttatacatcagagtctcctgttaatcattgacatttttgaggaaaggactacatcctggtcttatttttatttccaacacacagcatatttcctggaatatactaagcacttaaatgttattgaatgaatggacgattggataaatgatgctattattaaaaagggaaatggagaaagacaaaaatataccacagtcacaatctcagttatacaaatggctttaagaatctcattctacatagactcattatattctgtgtagaacaaatgactcatatttactaaatttggttattagttatatggaaagtgcaagtcagaagaacaatcagaagtttatgtttagattcacttatacacatgtgtacatttacatagttggtaattgatccattcttttctcctactggaatataaacatttctcaaaggccttccttgcagtctatagttcaggaaccatggttccaacactaaatggttctaaaggtattatcctaaaattttttaaataaaatctcaagtataaaaggctgattttatcagataggaaatgtgttctaagcttcctagtttagagaatatattcactaagtaaattcttcgcattattaaaagacgcttttcagtagctattcacagctattaaattttgttagggttttccaaggttttcctgggttatagacataaaacaaatgacacatgtgcccacagttatctgtaagtggacagggacattctactaaggagacttttcttctcagtgtttattcatggtgagaaaactctagcctcttctttttatgcaggagagatgtccttgagcctcctatgtgactgaaataaaaccttagagtggtacatcggttccaaaaccttaaacttaaatgtaagagtggtacgttggttccaaaaccttaaacaaatatttaaactcctacatagagtttaaatgttttcaagtttgaaatgtgtaattcatatttcatgggaccactggcctctcaaatacatacataaagaaaatttaacaggactcaatgtctagtctcattctttaagtttcttaaatccttggcctttcctgattttctttaagccctctattagtttattaggttgacaggagcccaggtaattatgctggcttctaagtcctactgtaagttacgtctgcatctccccgaacacacacaaattttagtgccactgcagcacttctaaaaacaaataaaagatttgtgaactagtcactaagcatccgacgcaattaaactgcatttgtttcttttttggctttctcacacaatcgacgccttgtaagaggtaggcactcctcaaatcagactgtgttttctttagaggaaagtgtgccaaaaatcctcctactctacgtaactaaagtctcaactagcaggaggtggacagttgcaacacacatacacacacccttcttcctactgctactaaaaccatgatatgcacatatgcacgtaaagatacaaactcatacctacaaatacattaatgtgagggaataggaataaaacctcctagacaggaattgcagatgcccacagactcaattaactgcagccttatgtaagataaaagaaacacaatgtcatttaagagcatatatattagtggttaagagtaaagcataaacgcatagaaaataaaatgacaactgtttggggaaaattgaattctctctttttaaatttttaacacaagtgaaaacagaccttaccttgaggtacctatatctcaagagctttgagtctccaacttcaggctgctacacttgaatatttttttaaagaaggtctttaaaatctggttaattagaactgactactattaactctttgattgatttagcatcctgttgtgctggctcgtgctcacacgttccccactggttcccttgagttgctctcccacattggtatgaatagtaggtatggactgaagtcacacaacagtccttgttataaaaataatttatcatggaaaaactaaataaggtgtacatgtggtctaagcagacccaagcagttgcaaagacctttaccccagtgcaatatcacacaatcccttcaaactttccatatttctgtttttttatctgcagtatgcaagacacgttggtgaggccacttccaatccgctccatgaagaaatgaaattctttacatgcttccatgaatattaccaaccatgagcatcagatgtgatgcatttcaataaacattttccatacattatccatataatcctataaagtagatattgtcatctttgtaataaagttgatgaacctgagtattaacaagcttagtaactcacaccacataagaatcagagattaaatttgagcagttttgtctgatttcacaactcagctttactgcgattcttcactgcctttgtctgctaagctctttactgtccatggtatcagaattacagctctttttccattattttgtggagagatgaagaaaggaaaaaatggacccttaacaaaataactatggaaacaataaagtcttccttttctcccatcaaagtactatctttagaagaatagcaactttttctccttactctcattagtttgctaaaatgcattctggggcttgaaagaactatggcatgtcttgaaaggtgttcttttgaatacttatttgcatgatgaaagaatcatcttatggaatgataaagcaactatatcattatcaaagagaatgtgtgttgagagacaactctccataggtctcttacattctttcatgtcttgcaagcagagtcactaactgccctttgttctggactatcttttcaaggatatctgtacaaaaaacaaccttgaagtgtaagatgtctctctctggagcaataggcaggtatgggtaatatctggtataataaagataatgtcccccactaaagtaaaaggcaggcatgcttactgctcattagaaaagattcagagtccctaagctcagaattcttcccctgtagaaggatccactgtgtgtaggtgttatctggccctctttatgacgccttatgggaatcggagctcagaaagcctgtgcaaaaatgctggtacaatggctactactactgctgtgagtaatgaactgtctttcatctctgacccaagagttggatgctttcaaccagcacctagtttgtaagctaacttacaagcttgtgagtaggaaaaagatctcagatcttcacagttcattgcaatataaccggtccctactatggaagtaggtcatcaaaatcagctttgttagccttaaatattcatagtataaatgtaagtttggctttgcccttgatactctatgattattaccatgctactctgagattataaataattaaatccctggcagactcccaatgaaatatttattctcacttactatccttcatatcaagtatttcaatatcttttaaaaaaagaatatgcttaatgaaggttggcagtagtttatgaagtactctgtgctttctgagtgcaattgttctgctcttttccattttcttttcttttttttattatactttaagttctggggtacatgtgcagaacatgcaggtttgttacacgggtatacacgtgccattgtggttgctgcacccatcaagccgtcatctacattaggtatttctcctaatgctatccctctcctagccccccacccaccaacaggtcccagtgtgtgatgttcccctccctgtatccatgtgttctcattgttcaactcccacttacgagtgagaacatgtggtgtttggttttctgttcttgtgtgagtttgctgagaatgatggtttccagcttcatccacgtccctacaaaggacataaactcatcctttttgtggctgcatagtattccatggtgtatgtgtgccacatttcctttatccagtctatcactgatgggcatttgggttagttccaagtctttgctattgtgaacagtgctgccataaacatacatgtgcttgtgtctttgtagtagaatgatttataaacctttgggtatatacccagtaatgggattgctgggtcaaacggtatttctggttctaggtccttgaggaatcaccacactgtcttccacaatggttgaattaatttacacccccaccaacaccaaccgtgtataggcattcctatttctccacatcctctccagcatctgttgtttcctgactttttaatgatcaccattctaactggtgtgagatactcttttccattttaaaagaacatcagcataatgcatcacattcatttaagaacctagagttatgttacactgaaaatgctacctttctaaataagccacacgtaattagaaattgtgagtttttacatgagtggggaccctacaaaatgaaatatatttttacatgggattttcattcataaaattgctttatattatttgtttcacttttgacatgtttctcattggactactatatctgaagattagtatttattgggatcaacatgagttcttgataaaaataaagactaaggccccccacccccaacccgctgcattttgtttcaagtttcctggggtaatattcaggtacaggaaattcaattaccctaagtgaaaccaccaagtgattctgatgcaacacatttagacacggcataagatacgttagaattggaatcaagaagatttggggttcaagtcctttgactttgagcaagatgtcaaagccttaactttttcaatgtcctcatttataaaatgaccacattacactataattgccacaagtttgtttcatattctattaatttatagatcaagaaacctctcttctagagagtcttctacttggtcccagttccacagaaaatagagcctgaggcaaatattaagagcttaatgcttgtttgggaggtgtaatccaggatggtggagtgaaagcaacaagaagtgaagcaggaactgatgcgaatcaaactcaagatggtccattatcaagcgagccactgcttcataaagtgatagaggccagcactgggctttgcatgttatcttctggatgaaatctgtgcttcaaaacaattccttagacacaggagactgagatcatcaaaagtggcacatgagtgccactggtacaatgtaccactcagatccaaacatgcccttccatcatatctggctttcaaaatacaataatgaatgcctattattttgtgaggacaagagggcccaggaggtatgttaggctgagggaatccgaagtaggtataaatcagcatttggccatttgtgtgtcctcgtttcctcctcagaatatatttatctcatttttattccctaaatattcatatgacataattgatcttgtttgtgttttaaattaacaagatgcaattcagattgtaagttctcttgaatgtgacgattcctcctagttttaggttatctcataccttttgggtcacagtatcatgcattttggacactcagacgtattgttttctgttttgtttgattctgtgttaagactctttcaaggcacggtgtgaaaaaaggcacgaacattggtgacacaaagtcctgatttcaaatcctgttctgtcacttgttagcgcatgaccttggcaagttaatttaagtcacagaataataatttactctctggtaaaagaatattaataatttccactcaacagtaagtggattggatagacaggacatatgacacatataggcatagcgcctggcacatatatgggagattagtgataatttccccaatcaccttttttttttttttttctgagactgagtctcgctctgttgcccagtctggagtgcagtggcacaatctcagctcgctgcaagctccgcctcccgggttcacaccattctcctgcctcagcctccctagtatctgggactacaggcacccgccaccgcacctggctaattttttgtattattagcagagacggggtttcaccatgttagccaggatggtctcgatctcctgacctcgtgatcaacttgccttggcctcccaaagtgctggcattacaggcgtgagccactgcgcccagcccccaatcaccttttcaataaagctttctaaaaatatatcctggctgatatcattgtatcaagctataaaatggggacctttctttaacagtttctttgtagatgaaaatttatattgagagattaaaaaatcaaaaggaaaaatcccaagtgtggaagaagtatatttaaaaatttctttctccagtagacagaccatttctattatctacctatttatctattatatacctgagcatctctctgtatacctatctctgtctcattcatctacctctatctatatctctacttatataaatatacttatctacccatttattacatacatatagatatttatcttcatttacaattaaggtcacggttgttgtatattaaaactaacacgttacctcatgaagaaaaagaaattgtgatccgggttatctgttacctgtctgcataagcttgtgtctgtgaacaaaagggtaggcatatttttacattaacaaaacataattaaccattttcagtagaatgagattcccttgctcattttagctgatgactcctgccacaaattaccaaatatacatagaattagaacaattatgtttctaacccttatcatctaggtctctgaggtaaccaatttttaattttatgaaaatgggagcagacaattttttatttgaaaattgtggctcatgagcaaaggcagtcctctaaaacagacactcctctggtgctctcttcctgattttgaccatgaattccttttaacctgctcagggatatgcaagaagtgggaggattatcacataacattatttcctttggagagtggggtaggattctccatcccctaataataaaaatttttactggttgaaatttctgtgagaaggatgagaggaaagaaagaaaggaatatgataaccagagtgtgtggctgcacccacatccagttactgttcgctgcatttgtatggggtttatcttactagaatgcgattactgtaaactgaaagactcaaagctagaccaaaggggaacggattatgcaggcagtggctttcccaagcattttactctatttggtcaaatcctttgattgcttttttctgtcctaacatatgtagttaaaagaatgcaaactattccctggatattttctactcttgttttgtctttttatgaatcttattgatcttatctacactaactcaactggatgctgcctccttctttacaatgaatatccctataattccctcctgatttccctttccaaaaaccattcccacctaacatatatttatgtaaatgcaaaaggagatatctggaaagacgcacaactaactcttaaaagtggttacccctaagagaggagtgggattgggaaatggagcacggtggggaagaactttcactttttagtcaatatacttctgaatggtcttcactcattactctgaaaatgtcttttgtgttatgtttttaaaaagaagaaaataaaagctttttcgtaattctagaagagaaataaaagaatataaggaagaaaggttaaataaagtaagcaaaagggagttatgggaaggaagagaaaagaagagaagacaagagaggagggatgaaacgggattgcatactgcatattgtcagtttttcctgttgttgtttttttcccctccatgttgatttcagggacaataatcctgccacttgcagagtaagcccctttgtgacttagaaaaaaatgacataccctagtttggaaacatatttaaaatttccattccctatgttaatagaatttggagattctctaatgcttcttcctcagatctaataatcaattaaaaatatatcagagtatcaaatatgtcacaattattctagatctgataggtagagtgtgtcaatgatatttatctctttgctaaaacactgagataatttatataaattcactataacaaaagagtaaactagatctactatgagtttaaataggaagactggtaacaataataacaagacctcattatttatttatttatattaagtatcagctatatttactgtgcaaaatgctagaaaaatatcacttaataaaataaagcaggtgccagacctcatgaaacctataaaggaaggtgtaatagtagaagtgattcaaacaaagaagttggttatctttaggggcacagaataaaacagatataatcaactacaaaataactttaaaaataattccagaacaatctttttattttacctaagaatacaaacatatcattcataaggccattcttgatgaataaaatctgatgtgccttcttttttttctttttcttttttgatgtgccttcttaaattgaaaaaattctgtgcagacagtccatgaaaagcacagatccaaaagaaaattaaacttacaaatgtgctatgagtgttctgtagaaaaataactgtttaaacataaaatcccataattagcctggatctctcattcaagcactgcaggtcaaaaccaccaacttttccaagtcaatggggaaaagccttccatttctctcttgtgtatttgggtgtgtgtaattagacttctccgatgccaacaaaaacccatgaagactttcttcatacaagtttagattgttccagctccaaaaatgggatcagaacgtgctggtacaccatcagcaacacccctggatgggaaataccaccaagccgtttcagcaaagaagttactgctctccactaagataaatatctgaaattttttaaaaaatggaatcagtggagcaaaagcaaaggctattagtctaatgactgcgatggatttggtgttgaattttgcctgctaatttatattaatttccttggtagttgatgtttgagccgatgctgtacatgaatggattattgatgtggtaaaatctgaggtcgctgaccactgttattagttagcatttggtttgcctacatattatataaaataaaaataacaacagtttaaataggataaaagtctctctcactatgttacacacacacacacacacacaccacacacacacatacacacacacacacacacaccacacacacacatacacacacacacacatacacacacacacacacacacacacacactgtgagttggcagtatcgggcagttatggtgactctgcagtgttatcagaggcccacattcctataattttgttccaccctggtggcacattgaagtgtccagtgatgactacaataggtgattcccataccacatgctcctctgcatacaactttgctcatttccagtaaagaggtggggaaaagtcatctgtcctcttgaatctgagctggcctcagtgatttgcaggtaagcagtagagtggagcagacagaatgctgtgtgatttccgaagttaggtcattaaagaccgtgtagctttgcctggttttcttgaagtacctactctcagaatctctagcactgtgagaagccccagcacatggacagcccatgcgtagatgttctggttgactgtcctcgctgagcccagcctcgaaatcatcttagtgaactggacatttaattaaagaacgctccaagtaattccagtactcagtcattcaagacttcacagtttaaaccccagccattataaagctttgtaggtcaaagacaagtcatcccactgtgctccatttgaattcctgacccccagaatcctcacacattataaaatagatgtgattttacattagtaagtttggagaggtttgttatgctataatagataattgatataaacacagtcatcatgttgctgaaccccaaggtgtatgctagagatgctgcctctgtattcacgttccaggcatcaagaaagaggagacaattccatttggaggaagcaattctgctacacttcattgatgaaaacctagtcatatggatttactgagtgccacagcaggctggtgaatgtagtcttaaagataagcaccagtattcccagttaaatattctgtgttaccaactagaagtctctgcaacaaatgtctactttttttctcaatttgattttagacactcccacttttaaaattcgttgtttaagataaggtgttatgtctatgaaaactcttactaacgtacaaatggaaaactaagaagggtaacacctaaatgtggacatttttataaaatcaccatctttcttatgaaaacagatggcgttgacaaggcaaagcatagttaagagacccaaggacattgcctcagaatcaaagagggaaatccagctgtagcttaaaggttaaaggtcttggacatttgagagtaggagtacaatggtcataaactagattaaaattattttttaattagctgaggatttataagtagataaatctttattattctcattctttaggcaatttttaagatattgctacaaaggtaattctgatgattttatgtgagaataatttattccaaaatagacaggtctcttttaaaattaccttatcttcaacttaaattcctaagtcctatatcttcttttgaatggtgattaaaacatatttttgtgcaaaggtatgcttcttttgatagctaaaacctagcttatataaccattaatgggtagtgattgtctaaatttaacctgggacaagaatttgtttcaaattgcaccaaaatctccattgagagcttcctctgtaatcaccctgaatattgattccctgaaagcagaagctattttaaagacgagttaatttcttcattgaacattggtacctagagagaatctgtcaaaatactgtagggatggtgggcaattgactggacttaaatatgtttcttctaagctggaggatgcttatcaaactacaacctggaatggtcttggagtgaaattgttcttccattctctagcaataggcctctgagggacctgagaacagttattgtgctaatcatgataataataatagtaataataaatagcatttaataactgttgcttatgagaactaatttgtgtcagacacttggtgaaaatgttcacattttatctcagttagtctttattacaaccctgtgaggtcatttctactgttatcctcatttaaccagtaaagaaatggaaattaaataatagggccaacatcttgcagagctaagagtcaaactcaggccattaggcagatggaaacaccaggggaacattatgtgaattctgagacttatatgtctgtcattctgtctcatattccatctcttttgacctgagtttttttttaaccatataaagccatcccttggtgtggatggaggattggttccaggacctcctatagatactaaaatctatggtgactcaagatacaaaatggtgtaatatttgcatattacctatgcacaccctcctgtatattttaagtcaactttggattacttgtaatacctaataccatgtaaattttatataaatagttgttatactgtactgtttagggaataatgacaagaaaaaaatgtctgggcatgtttggtagaggcacaatttttaaaaatagttttgatctgtggttgcttgaatccagggatgcagacctcatggatagggacgaccttatccatgtttaaggttgaaaatttaatgtttaaggttttttctgtggagtgaatccactgacccaggcataagcattccaaagcctgtcgacttaggctactttctagatagagaggtagatagaggacaataagccacaatgccaccaggatgtaggtgagtgtgtcagagggagggagtccctttgcttccttccttccttttgtttatttatttgtccttttttgcaagacaagtttccctaatggaggtatgtggcttagaggcagcctcacttgaatatgctttgggagagagcctaatacctcatatttttaaaaagaaaaaaaaaccacacgcgcgcgcgcacccacccacccacccaaccacacacacacacacacacacacacacacacacacacacacacacgctcatatatatattccaagccaaaaatatcaagcagctcatggctgttaaaaagccaggcaaagctgcgtcccacccttcagtgtttttctttcaaacacattgaccaccctcctttcacaacatcttatttagtgaagcacgcgttgtccaaacggaataaaatgttgcaacactgaaatctggattctgcctgaagttctctttcatcgacacactttctcacttttttccctccttcagtgctaggcatcatagcagaaatctctccgtggagatctggagggaaaggggttaatttgagaggcttggagccagacctctcttaactggggagttggcagccagcagtttggaacactgcctcgaatgtctgactgaaggtttttattatcctttatgcccaaaggtggcttttagacacccacagcagcacacggacctctgattgggattcgacagacgggagccagaaagctgtctgccctttttgcgatgactggggaaccccacggaggaaaccaccaaccccttccccaacctgaggctggacgtgccctccctcacccttcaataaacttcagacctgtcaggggagttgtaaaatcagtgtggagttctgagagttggtgggggagggggtgagcaggagaacggagggggcgtgagagatggaatgaagagtgaggcaggtctaccggagacaaaataaatggtaagaagaaaggaaagaataggagagctgaaaacaaagaaaaagtaacgacatgaagacaaagttgacgacacaaatgagaattacagagaacaagaaaggtgaagagaagaaaacagagataaggggaaaaagttaagaggctaagaagcatcctcatccaagaacctcagatgcctcacttgcctttgttatccacaactcagctatatgaagggttagcgttaccatctgtatggtgttattttatccatacaagattcatcctgacctatgcgattaaaattgacccatgttcgccagggtgaaaccctgtagcatccaagaaaactttgaaagtatcctaggctccaaagcagtagctttctgatttgtttgatttttcccttcccagaaggaaatacaaaggacccaggtatttgaaagcagattggaatctaacaccgacaagacgctgttcttatataacatggtggttatgagcatccaaagagatggtccatgcagaggaggtcaaacacaaatccagtaggaaaagcgtgttctttttttttttttaattttttttaattatactttaagttttagggtacatgtgcacattgtgcaggttagttacatatgtatacatgtgccatgctggtgcgctgcacccactaactcgtcatctagcattaggtatatctcccaatgctatccctcccccctccccccaccccacaacagtccccagagtgtgatattccctttcctgtgtccatgtgatctcattgttcaattcccacctatgagtgagaatatgcggtgtttggttttttgttcttgtgatagtttactgagaatgatgctttccaatttcatccatgtccctacaaaggacatgaactcatcattttttatggctgcatagtattccatggtgtatatgtgccacattttcttaatccagtttatcattgtggcgattcctcagggatctagaactagaaataccatttgacccagccatcccattactgggtatatacccaaaggactataaatcatgctgctataaagacacatgcacacgtatgtttattgcagcattattcacaatagcaaagacttggaaccaacccaaatgtccaacaatgatagaaaagtgtgttcttttagacagcctggtgccacctttagtctcattcccatgtagcctcctgagatcaatatatgaatccattcatcagctcacaaactctgcttagagacatcctgaagccctattgcttaaggagtcagcattctacatgacccggggagcctgggggcatttagcatttatttagcaagaagggtaatgaatgtttcagggctttactgccctcaaagtgcctctttctcagccatcatcttttggatcggcacattaccatgtcatacaaagaatggcagatgtcattcatatttccaattagcaaagaagggaagcagcaaagtgagtctcaaagtgcgttccataaaccacattctaatcatcttgttaaaaatgcaggtttactgactctacaatatagagagactaaattcgactctggtggaagctgtatttttacaaggcactctaataattccaaggccactgggtttaaggagcacagggctggcagactggagaagcatattatcgatatctcaatgggacttttacaacagcttacttatttccatttttatagatgataaaacagcaattcgatgagattcagtgatttgtgcaaaggcacatcagagtccattgcaaatcagtaaggggtataactagcaatatctaactaaacagaaataaatgtataactagaaataaaacctagatctttcaacttctggttttctttgttctttgaactatgtcaggctgcctccttctgacataggagagatttgacggtggctcttttaaaatctgctatggtagctctcaaagtgggtaataatagtgtgtgatttatttatgcctcacagtatcattcctggtgaacacaggcctccaatcttgatcacgctcccctaaatgtggtcctatgaaaaaatgcacacttcctactcagacatgaaactattttagttcctaagcaaaatctttaagccatgggaattggaaggatcgctattccaatagctaaattgtaattatattaggtgttccaggcaccattataaattcttaatgcatgtattaaataaaacagatgagctcattcacttttttaaagcaaaccactgaggtaagtaccagcactccctgatgaagacagtgagacccgatgtgacttgcccaagtttacacagctctaagctgggcaatgaagaaaggatgttttgctctagaggaagcaagattaaccaccactaatactgcctctctgtctacagtggtgggagtgtatgatgggcattggggttgggaagctctgtgtaagtaagtttcagtggagaaaaaaatattccccaaatagctcaggaatgtgccagcaatatagaactataaatttacttttgcataaggcatctaaaggcacatttaaaataaatcatcacctttaaaatcaatcaatcaaataatacagatgtacaagtgaccatgaagctgatgtggttcagttattttattttatagatgaggaaattaaggatctgagaggtaaagacctttttctaaagtctcagattgcacaaaggtaagtattggccaagttgtgtaagttgcgaatacaatcaatttcttgaaacagtgcctgaggttagaatgtcagtattgttctagtgccatgatactgctcaatcactagcatccgcaaaacctcagaaggatacagcagtaagtgtttgttgctcacaagactggtttggttatctaggtgcctctgctgatttttgactgagctttcaaatttctgggggtcagttgactactgatcgacctgtgatggcctcagctgtggcaagctggctctatcacatagatctctcatcctctagcttggaacacttttttatgtcaatggaagacatgcaagcacacaagaggaaatgtgtacacatcatttcatgcttctgcttgccttcatgtgactccaatcatctaattgaccaaagcaagtcacctggccagcccctgaccagaactgggcaagggacacagaaacaaagagggtcagtggattacaaccattaatgcaattaatctaccacaatgagggaggaggaaaggcctggcatggaagtagtttcaaggaggaggcaaaaaatcaaataaggccaatttatgcaatgttcattttaacatccaaactttgaagtcacatcttccattttagggctcatttgctatatgtaataaagagaaatacatcattttgcagaagtaaggaaagtgcggaatttaagaagcctgcaccattttataaaagcaggtttaccatgctagcaagcatcatattgaatttagagattctggcacatgttccaactccacttaggttattcatagataaacatagattccttttcagaacaactgggaaacatatatatatataaaatttaattttttaatttgatttaaattttaaaataaaattgagttttaattacatatattataaattatgtatgtatatgtgcatgtgtatatatatgtcatgcaacaggaaactttataatggatctatcaagtttagtttaagaagtgaatttactttgtttaatttacaaacgatcgaagtattagcaatttataaaggattaacacatttgaaaatttttcagaattatcctaggactaatttggatacttataacaaaacattaatatgctgtactttggttaaatcagagataatatttttaaatggagatctattttttaatatgtgtgagtatgtgaggaaaatgttgtttaaggattaaaatacctttctcaaggaggtaaaattcaagtgttgcattttttaaaaattgtagctgttattcctggtaaagaccaaaactattttcacctttcctccatgctgtttggactcattccataactaaccttcttctgtcacttcccaagtctcttaaaatgacttctttaaaaacgcacatggactcacacagcctcacaagcatacaagctctcatacaagtgagattaaaatgaaacaacagaaacaaataaaaacaaataagcacaatcctactaatataaactcttgcaaagtctggcaataaagattatctcacgtattctattaaagtcccattataaaataaaacaaacagaagtatcaaatagcttcatcatagctgttggcttctcaagaaactgaggctatagagctttggctgccttttatgtttatttcagaaaaataaaattattataaacagattgctattgtagtgttaccatggtccccttgccaggtcattgtaagaggttaataggttaaaatttgatgttgcaatgttatcctttaaaataaaatgctactctaacaatgagtgcagtacaacagctaaattgaaggatatcaagatggttttgtcaaaatgctctgctgtccagtgacctctttttcacgatgccagggaatcctatgtattatattgcctgcgaatttttgatttattagaagaagcattttttttaaatcgtggaggcaacagtaacttcattaacctgtaggtggagataataatagtcataaaagtaatatggatgactgcacagctctacaaatatactaaaaactattgaattgtgtcctttgaatggatggattgtatagcatatgaattatgtcttaataaaactatataaaaatcaagagaatttttgtttacaaaaagaaatatggataagataaaacaacaagccagagactggtagattgaatcagttggagggtttcttttcccacattcagtggcatataaaattgcctcccaatgaataaattcagtcttctggtgggatctgtccattttctttaagaaaaagtttaagtatttatctccatcactatttattaacaactgttaaactccatgatgtcttgtgagctgtgtctgtcttctctagctatgggaagtatttgattattatcttctaagaatttggaaggaaaaggatgtgattgaggtctcttaaaagattcctggggaaccaaattttcttcagtaaatgttatcagaaatgagacagatttcacatcatcagtcttcatatgtattggaatttttctctgtgagcagaaatgcacctaagactttactagctgaaattttttatttattctcaacgtgttgaggtatgaggtcagacttgactcaagacaagattgaagacttgctgaaacagggaagaggctctgaaaacacctctccctaggacatgcccatcagcaccatgacagtttaccattgctatggcaagacctaggggttgccacccctttccatggcaacacccggaaattaccacctgttttttaaaaatttctggataatctgccacttaatttgcacataattaaaagtgggtacaaatatgactacagtaccacctctgagctgctactctgggcaccctgtctatggggtagccctgctccacaaggagcaggatctctactgctgctgtgctctgctgcttcaatcaaagctgctgtctaacaccaccagcttgtccttgaattgtttcctgggcaaagccaagaacactcctggggtaagctccaattttgggactcactggccttgcatcactgttattctgtatttttccataagtatcaatttgtatgcaattgaaaaggtggtaaaaatgcccaaacaactatgagaagtgatctattcagttaaacacacacataatgtcattgtaacagaaaatagcttattattatttggcttgcttatatttgcttaacttctggggctaaatttgtagataagagcagtcagacagacatagtgtattagtccattctcacactgctataaaggtactacctgagactggataatttatgaagaaaagaggtttgattgactcacagttctccatggctggggaggcctcaggaaacttacaatcatcgcagaaggtgaagggaaacaagacacgttttacgtggtggcaggagagagagagtgaagggggaagtgccacttttaaaccatcagatcttgggagaactcactatcatgaaaagagcataggagaaaccgcccaccgaaaatccaattacctctgacaaggtccctcccttgacacattaggattacaattccagatgagatttgggtggggacacagtgccaaaccatatcacagagccttataccatttctattgttccttgaacatatatgttttttgtttgggtcactggcttgccctttggaagcaaaacagcaagctcctttgagtattttactttttttctattaattgaacagatgaaagttaaaaaaaaaataaggattctaaactcatgtagctgtttaccaaatagatctaacacatgtgaatatattttcattttttcaacctgctttgatatatagtgtatgtttgacccttgcaacaaccatgttaataattctagctggaatggtttttaatctctcgaaattcctagaatactttcctatttcttcccggaggttcatagaatatttgctaactatactgctatttgtggatgtagtttgtctaacttaatatattataaatgtttcaaaagcaggggcgtattccttcacgctgtgcaatcccctatagcacttagcaccaaataaatgagtgcagatatgcccaattagcaaataaatggaactacaaagagactaacccaaattttttcttaaattgaaaagcaactttaggtctccagaaagcaattttaaaatatgtatcaatatcccttgagtcaatttcccattcaagatatttatgctaaggaagtaaccttagatgcaatcaaaagatgttatcctagcattatttaaaatatggttttaaaggaagtggcttaaatgcaaataaataaataaataaatgaaatagtatgcagtccctaagtatgaggttttagatggttttcaaattcatgaaaaatactcaaaatctatggttatgttaaaatatatatattttttattgttttctaggtttcagaacgcgattgctcatgttttcaaaatggttcttatcttttaacaagatacattggaagacatatatttatagattaaaacaatctagagtctgggatttgtttggaaatatgaggtgaataagtaggtagaagtacagatgaataaaggactgacgatgagttgataatttataaactagatgatgggtacattgggtatactattgttctattttttaagtcttttttttttttttttttttttttttttggcaaagtcttactctgtcacccaggctggagtgaagtggcatgataatagctcactacagtgtcaaattcctagactcatgcaatcctcccatctcagcctcccaaatagctgggactacaggcgtgcaccactacgccttgccaatttttaaattttttgtagagacaaggtctcactatgttgcccaggatggcctccaagtcctgggctcgtgattcttctgcctcagcctcccaaagtgctaggattacaggcatgagccaccacaccaagtctattgttctattttgtttatatttaaagttccatagtagaaaaaattcaaaaaccacgtgtatgtatcatctaggtgagtaagatagcttccatttgtcctactccccatataacttttccattctctgcctcactggtctctgcctgatggagcttgtcttagtttatttgtattgctataaaggaatacctgaaactgagtaatttgtaaagaaaagagatgtatgtttctcacagttctgcaggctgtgcaagaatcatggtgcttctcgggaggccctcaagctgcttccactcatggcagaagtgaatgggagcaagcatgtgcagagatcacatggcgacagagaggaagtgagagagaggaggaggtgcctggctcttttaaacaaccagttcttacaggaactaagagtgaaaactcactcattcccatgagactggcaccaagccattcacgagggatctgcttccatgacccatacacctcccaccaggaccccacctctgacactggggataacatttcaacataagacttggcagggtcaaacaaaacatatccaaaccacagcagatgctgacctgcaaggctggttccctgagcatataaactgtgcagttgttcacatgtccccatgctcagaaggttctcactcttggtttaacactctcttatcaccttcctgaaattgtaataatttttgaataggtgctgtaattttttatttgcactgggcgctataacttaggtaggcagccagtcttgctgaattatattagtgtgtgcagtaaagatttaactcagtgcaaagaaagatttgtccctttcctcctaactcttgggaggtcatctctaagcacttggaatgtcctccctgataagaatgcctttgtttacctgggggtgatagggacatgccagagtctttatggcaatagtgttatagggtgggccacagtaacagctcaacgtctggagtcactagtgactgagttcaaccacacaacagtcatatatataaaagtggccaattcttaatataaactctggacaccaacgctcaagtgagctttcttcattggcaatttatctgcatattgtcacatgtcattgctaggagtagttaatgccatctacatgactccactaggagaggacatctggaatctctaccccaggccccttctcaactttgttctatgtgcctctgtgcctcttccctttgctaattttgacctgcatcctttagtgtaataaaccataaccatgagtattacagttttactgcagtctgtgagtacttttagcaattttttttgaatggaaggtggtcttggagactccctcaaactcacaggttaaccttaatgggtttccatgtcctctggcttactgttgagttccgtcaatgcacaggccccatagaaaactggggaaagataaatgagaggtcaaggtatttataatcctgattctctccccatgagagggtgtcttatgctggctgtgtctctgaaagtcagagggcgtaatgctcccacaaagcatcctgttccatatgatgctttctagcttcctataaccttcccctcatctctttggctgacagcccttccacttctggatcccttacattcagctacacctttgcaatgagttcctttgaaagcaaaccatctcatgttttcatttttgtttttcctaacataagcaggtcttctgtttcctgcctgtcttcctgtttcctatctggctgatagaaaatacaagggcaagaagtatacaaaatgcggggtggcaatgatggttgcattctgtatttttttattgcattgttttatattttgtaataaaacctttcatacttttgttatcaagaaaaaatattatttttaaaaaagtagtaatgcatgggacaactagcagttctactgtcagacatcttaacctctgaattgtgccctttcttcattcaaccaactctctatttgaggtcagtaatcccttgaccctccctttgttcttcatcatcactcactggctattttggctactatcccttccttccctctcatgctgtgaaaactcccttaggattgctgagtgatgacttgctgttgatcctggagttttcatttttcttttactttgagtccccacagatggggagggtgattcctaagagtgggaagttggttccgtcctcccggctgcctggttctccctagctttcccagcgctgtagagcacggaggtcgcagagaggaaagacaatgtaaagcaacaaacataaccagaaaaggccaatttcatcattttctttttcataaattccccccaaaataggatgatcacatcctcattattaaatgtggtctaatttttaaaagaaaatttatcttatattagtaactatttcctaaaatgtcgaagttaatatttaaaccctgttaagtgttcttgtagttgtattgactgcactatacttatcccaattgctgggattacacaaaaggataaaaacagctatgaatattatataatatttaatgatacctaatttcttatagaactatgaggtaattaaatactttgttccttttttaattgaggctttcaggtacaggctagaaaacttgctagacaaattctaacagagctgttgtcaaatactttgtataatgtttttcacagggaactttgtgtcagagcatagagatggttagagattagcgctcctgatagatttgaggcgaatggagaggagggaactgaaacttgttaacatgctatgcactatatacacgtcatgctttacagataccgtcttgttcaactgtattgtaagctaggtattgttatttctattttgtacacaattgtccaaattttatagctggtaactttgattcaaatcttcatacttttcaatatggcaaactgctatatcaataatgttaatttgtctaatacatatcttttgttcaaattcaagcccattagatccttttgttaaatgaacaaattatgttaacaattttaaggaataataatatcaactagtagaatttccagatattgggataagtggctttttcatataagaagtcaataatgtcaagttaagaaaataaaccttcaaagacaatcagagctttacatctcatagaagaatctgagtaataaccttcctgtgtaggaaatagttatgttttcaatctttaacatggtcagactaaaaatataaccatcattgattaagttcctgatttattcttcatataccacagtagaatctctaaatatgattggcacctaagttgaccttttgtggccctgaaatagattttcaggttaaaaaaaaatagggtgactatggctggaaaagttcaggtccaggttcatgtcacaactggatgaagcagtggattaggatttcctcactttcgagccttggtttttgttaagcttgtttcgcttaacacacaggccttttgccctgctgggtgagtcaaagatgatctacgccagggctctcactaataccagtttttttttgttgtttttttttttcctcatcccctcaataccctcgggagttggagaggttttcttattatctcctcaaaaccactgagttattgaactgctgaattctgactaaagccactaaacccaggcaatgcccagcaggagataagagatttatttggcggaaaaattgaaccaatgagtctctacactctacgactctggacacaatagacgacagtaggactaaggggaagtctgcactgtgacctgcaaaacatgtgcccctgtccaatagccccactgtcacccagacaaaattcctacagaactccccaaagaaaacctcccagcacctctgcagccaacatttttggtgtccctctaccaaccccaccatctgcaggtctttcaagttccctttatcatatcagggaacctgtccccaagcctttgtgtgcttttgcttctaagagctcgcacctgggactctatttgaagggcacttttcctactggagcctctttgtcctgtatgccaaagagagaactaaagatgtctgagagttatccttctcctcagatgacacttaaccagtgactgactcaagagggtgtgtgagagcctagctcatataccctaccctacagtttccctgtagctttggactggagttgggattttgcctggaatcttactcttccttgccttcttcctcttgtccgccatgctaatcccactcttaacaatatcacaagggtgtttgcttaatagatcacttccataagaattctcccttagcacttgcttttggagaacttaatccaagatgacacccaatcactatacagaaaaacaccaaacacacagacttttccatatgttatctagtgcctcagtcctaattatatatgtacacccaggaatcaccaagcttctgaataaagcttccaagatgaaactcagaggccaaaacaaaacaaatcaatatgaaaatcagggaacaaaaacaacaaaaacaaaaatgccaaaagctcagtgtcaatgtcagtatttacattaggtttgagtgtttatattattttaacattacaaatagttttcatcagcatcatcacctgggaactcattaaaatgaaaattctcaggctcaccccggaactacccaatcaaaaactctctgggtagagcctagcagttttgaattttaacaagccttgcagtcaattctgatctaacctcaagttgaaaataacacatcagaagcatgtaataacaacaataataagttgttatatgaatacattaagagaatgggagaagaaaagtgtctgttgggaggatggagaaacagaaatcttaatctcatttatcataagtagaagtcaacagattagtaactaggattgctataccaataaatagcaccattcattcattcactggacaaatgtattgagtacttattgtattctaggcatggttcttcattctaatacaacaacaagcaagaaaaaaagtttgccattctcctgaagcttactttctaactggggaaaaaataaacacacaaataacaaaaggaaaaacacatgaggcactgatgacagagggacagagcatctattttacattgagtgcttaggaaatactctgataagtgacatcagaacaggcaaaagacacagaagcagccccagcccaatcatttggatctttacaggctttgggaaaggtttggggatttattgagtgaaataggaaggcagtccaggattttgagaagatacataacatgatcagacttatgttaaggctctgtggaggtggaaagttgtattttccaagtagggccataaaaatgtttcttatcccacatatttttctgcaatgtgtccctgacatgtctctcactggaaagtaaaatctgtgtcctctcactcaaatctggggaagtttgtgactttcagtgattgtcaaggctaggtcagaaaaggcaatgcaacttactttctctttctttctttctttcttccttcctttctttctttctctctctctctttctttcttcctttctttctttctttctctctctttctttctttcccctccttccctcccttcctccctttcttccttccttccatttctcctctttttctcttcctctttccttccttctcttcttccttctctttctctctcctctttttcttccttccttgtttccatccttacctcctttcctttctctttcttctctttcctttcttccttcctttcttctttctctcctttcctcctttcttctctttctctctctttcctctctcttttcttccttcctttcatccttcccttcttctttctttctttctgtttcctccctccttcctttcttcctcccttccttctttcctttccttcctttcttccttccccctttcttttctcccttccctccctccctccctttctctctctctttctctctttctttctttaaaaatttgttcagagtattcacgtttagactcccgagccttcaaatgagagagctaaggccatagaaaggcctcctgtggtcaccccagggagttgttctaacactcacatgctcccagcccaggtgccagccaggtgagtgaggaagacacatttaagtgatcccagccccagctttcaggtaccaggatttgactcttcccagctgaggctttagatactgtggcacctcaaagaaaagacagatcatccctgttgtgccctgttcaattcgctgacccacaaaatctttagcataatacaatagttattttacaccactgagtatgggttgtttgctatgcagcaattgtagctgaaacagtgacagatagatttcaggacctagctacgaacagagccagcattaccagaagcatcaatatcacctggcatctggttaataatgcaaaatctcaagcctattccaggcctactacatcagaatgtgcattttaaccagatctccaggtgatttgaaagcacgtcaaagtatgtttccaaatctgttttaatctttgagctaaaatatacttacaggaaaatgcacacatcttaagtgactatttacctatgcatacatctgcacaactactacccagatgaatatacagaacatttatttccatcacacccagaaaatttccatgtgctccttctgaatcaaaaaccctctctcaaaccctcctagaaataacaacttttctgatttccatcaccatatataaaatattttgctgttgaatttcataaaaatgaaattattcagtatgaattttgtttgtttctggcttcttttgctcagtatactgtttttgaaattcattcttgttgtatttctcagtagcctattcttcttaaaaattgctgtgtagtgtttcatataaatatactattttttaaattatattctcctattgatggacatttggcattttctagtttgtagttataataactcaggtgtgtgtgtatgtgtttgtgtgtgtgtatgtatgtgaacacaagtacagtattcatttctcttaaagaagaaatacctatgaatggaactgttgggtcaagggtaggtgtgtgtttaactttattagaaattgccaaagtgttttccaatgtggttgggccattttactttcccacgagctagaaggagagatctagtcactctacttctttgacaatagtcggtattgtcagccgcttaaatttagccattctggtgggtgtgtagtagaacctctttgtggttttcatttgaatttccttaatgactaatgatgtagaacatttcttcatatgcttattgactatgagatatcttctttgagaaatcccttcccagtcttttttctatattttaattgagctgtattgagtgcagaagttcattactattctagatatgagtcctttgtcaaaccttgtggccgtaggcagttcctaagatgattcgtaacaatcctcgccctcttgtactcatacccttgggcaatctatccccttcccttaagtgccagtgagactatgactcgtttctaatcaatggtgggaaaaagggatgagatgtcactaccaccatgtttaggtgacataaagttgtaacttacatcttgctaataggctctattttcttgttggcctgcatacttcatgaagcaagctgctgtgctggagaggtcaacatgcaaggaattaacggtgactgaagctcataacccagcatgcctagagaaactcgattctgccaaataccatgtgagcttaaaggcaggtcccttccacatcagctttcagagagcattccagccctggctgaaatattgactacagcattgtaagagatcctaaagcagaaaatccagctaaactatgttcaaactcctgccacacagaaattatgagataataaatgtattgttttcagttgcataatgtctttttttatacaatagaaaatacatatgcaaatatttttcctgagttataaatgatcatgctgatgggtgtgcagtggtagctcagtgtggttttaatttgcattttcttaataatgcttttgatatgctttgggctattggatatcttcagtgtgaaggacttgttcaaacttttgcctgtacatacatatgtgtgtgtgtgtgtgtgtatatgtatatatatatatatatatatatatatatatatatatatatatgtatttttttttttttttgagacagggtctcactctgtcacccaggctggagcgcagcggcacaatcttggctcacagcaacctctgcctcccagattcaagcgattctcctgcctcagcctcccgagtagctgtgactacaggcacatgccaccacgccagactaatttttgtatttttagtagagatgggtttctccatgttggccatgctggtctcaaactcctgacttcaagcgatctacccgcctcagcctcccgaagtgctgggattacaggcataagccaccacgcccagtctatatttttaattgggttgtttatcttttattattattgagtaatggggctttttaaatctataaattctggctatttcttctttgaattcatatactaaaaatatttcctcctgcttgcttcagcagcacatatactaaaattgaaatgatacagagaagatgatggtggataggaggcagaactagcttgcagctcctgctcagacagacagagcaatgtgtggagactcacaccgtgaacttttgctccaagaactactagaggaaaaatgagggaagccaagagaatccacaaaacctttgaagaactggatcatcgctgcaggctccctgagataccgaaaaactgagtctgcctgctttcacgaaggggaggctcatggtctgggcaagttctcagccctggtcactggctgcctggaaacagacttggtgctgttgcaggggcacggtgggagtgagaccagcctttaggaccaagggagtggggtgaggcctgtgactgctagcttttccacacttccctggaaacctgtatgactcagcagaggcagccataatccccctgggaatacaactccattggactgagaacccatcccccacagcagccacagcaagctctgcccaaggagaggctgagctcagccatgcttatgtctgcccctatctggtggtctttctcttccacctttatccgcctccccccacctctaccccatagctgaagacaaaagagttctatggccctgcctaccacctgagaaacctgaatacttaaccaggtggccatagggcaagtttacatcctacctataggaccacggctgatgcattcttgaaagcgccacctcctggttggagaccaaccaacacaaaaccagcacactgaacagaaacacaaccaaggaccctcacacagtccacttcactcccctcctacctccaccagaggaggtgctggtatccatggctgaaagacctgaagatggatcacataacaagactctttgcagacactccccagtaccagcacggagtctggtagctccagtgggtggtaagacccagaagagcaaaaacaattactacagtccggctctcaagaaaccccattcctgggggaagggggagaacaccacatcaaaggagcaccccataggacaaaagaatctgaacagcagcccttgaatcccagatcttccctctaacatagtctacccaaatgagaaggaaccagaaaaacaattctggcaatatgacaaaacaaggttcttcaacactcccaaaagatcataccagctcaccagcaatgcatccaaaccaagaagaaatctctggattgccagaaaaagaattcagaaagtcgattagtaagctaatcaaggaggcactagagaaagatgaagtgcaacttaaagaaatcaaaaacatgatacagaatatgaaaggaaaatgcttcagtgaaataggtagtataaataaaaaacaaccacaacgtctggaaatcaaggacatacttagggaaatgtaaaatgcactggaaagtctcagcaatagaatcgaacaagtagaagaaagaacctcagcgctcaaagacaaggctttccaattaacccaatttgccaaagacaaagaaaaaagaattctaaaaaatgaacaaaaccttcaagaagtttgggactggtgttcctgaagaagcggagaaatctaaaagtttggaaaacctgtttgagggaataaatgagaaaaatttctccagccttactggagagctagacatccaaatagaagaagctcaaagaacacctgagaaattcattgcaaaaagatcattacctaggcatatagtcatcagattatctaaagtcaagatgagggaaagaatcttaacagctgtgaggcaaaagcataaggtaacctatcaaggaaaatctgtcatattaacagtagatttctcagcagaaaccctacaagctagaagagattggggtcctatttttagcctctttaagcaaaacaatgatcagccaagaattttgtatccagcaacactaagcttcataaatgaaggaaggatagtctttttcagacatataaatgctgagagaatttgctgctaccaacaagcactgcaagaactaataaaaggagctctaaatcttgaaacaaatcctcaacatacaataaaatagaaccttaaagcataaatctcacaggacctatataacaataacacaataaaaaaatagaaccttaaagcataaatctcacgggacctatataacaaaaacacaatttaaaaaaagggtattcaggcaacaaataacacaatgaatagaatagtactctttgcacctcaatactaacattgaatgtaagtggcctaaatgttccacttagaagatacagaatggcagcaaacatatttggaaaacatatttgagggaataattgaggaaaacttccttggccttgccagaaatctagacatccaaatataagaagtttaaagagcacctgagaaattcattggttggataaaaattcaccaagtttctgctatcttcaggacactcacctaacatataaggactcacataaacttaaggtaaaggggtggaaaaacatattccatgtgaacagacaccaaaagtgaacaggagtagctattcttatatcagacaaaacaaactgtaaagcaacagcaatttaaaaagacaaagagggacattgtataatgataaaaagactagtccgacagtaaatatcacaattctaaatgtatattcacctaacactggagttcccaaatttataaaaaattactactaaacctaggaaatgagatagacggcaacgcaatattagtgggggactttagtactccagtgatgtcactggacaggtcatcaaaacagaaagtcaataaagaaacaatggacttcaactgtcccctacaacaaatggacttaacagacatttacagaacattctacccaacaactgcagaatgtacattctattacaccagcacatggaatagtctccaaaatagaccatacgatagaccacaaaacaagtcgcagtaaatttaagaaaatcaaaattatatcaagtactctctcaggctacagtggaataaaattagaaatcaactccaaaaggaaccctcaaaaccatgcaaatacatggaaattaaataacctgctcctgaatgatcattgggtcaacaatgaaggcaagatggaaatttaaaaattctttgaaatgaacaataatagtgacacaatctatcaaaacctctgggatacagcaaaagcagtgctaagatgaaagttcatagcattaaatgcctacatcaaaaagtctgaaagagcacaaatacacaatctaaggtcacacctcatggaactgaagaaataagaaaaatccaaacccaaactcagcagaagaaaagaaataacaaagattagaccagaactaaatgaaattgaaacaaacaaacaaacaaaaaaccacaaaagataaatgaaacaaaaagctggttctttgaaaagataaataaaattgatagatcattagcgagattaaccaagaggaaagatccaaataagctctctcaaacgaaatgggagatattataagagataccacagaaatacaaaagattattcaaggctactatgaacacctttacatgcataaactagaaaacctagaggagatggataaattcctggaaatatgcaaccctcctagattaaaccaggaagatatagaatctctgaacagaccaataacaagcagtgagattgaaatggtaatttagaaattgccaacaaggccaggcatggtggctcacagctgtaatcccagcacttcgggaggctaagcaggtggatcacctgaggtcaggagttcgagaccagcccaaccaacatggtgaaaccttgtctctactaaaaatacaaaaaattagctgggggtggtggcagacacctgtaatcctagctacctgggagactgaagcagcagaatcacttgaacccgggaggtggaggttgcagtgagctgagatgacatcattgcactccagcctgtgcaacaaaagcaaaattccatctcaaaaaaaaaaaaattgccaatgaaaaaaagtccaggaccagatggattcgcagctgaattatatcagacattcaaagacgaattggtaccaatcctactgacactattccaaaagatggagaaagagggaattcccccctaaatcattctatgaagccagtatcagcctaatatcacaaccagggaaggacatgacaacaacaacaaaaaagaaaatgacagaccaatatccctgatgaacacagatgcaaaaatcctcaacaaaatactagcaaaccaaacccaatagcatatcaaaaagataatccactatgatcaagtgggtttcatatcagggatgcagggataaagtcaataaatgtgacagagcacataaacagaattaaaaacaaaaaaaatcacatgatcatctcaatagatgcagaaaaagcatttgacaaaatccaacatccctttatgattaaaactctcggcaaaatcagcatttattaaggtaataaaagccatccatgacaaacccacagccaacatattatactgaatggggaaaagttgaaagcatacgccctgagaactggaacgagacaaggaagcccatttcaccacttctattcaacatagtactggaagtcctaaccagcgcaatcagacaagaggaagaaataaaagggcatccaaattggtaaagaggaagtcaaactgtctctgattgctgatatgattgaatacctagaaaatcctaaagacttatccataaagctcctagagctggcaaatgaattcagcaaagtttccagatacaaaattaatgcacacaaataagtagctctgctacacaccaacagcgaccaagctgagaatcaaattaagaactcaacccctttcacaatatctgtaaataaaataaaataaaataaaataaaataaaatacttgggaatatacctaaccaaggacatgaaagacctctataaggaaaactacaaaacacacctgaaagaaatcataggtgacacaaacaaatggaaacacatcccatgctcatggataggtagaatcaatattgtaaaaatgaccatactgccaaaagcaatctacaaactcaatgcaattcctgtcaaaatactgccatcattcttcacagaactagaaaaaacaatcctaatattcatatggaaccaaaaagagcccacatagccaagactaaggaaaaagaacaaatctggaggcatcgcattacccaacttcatactatactataagaccatagttaccaaaaagagtatggtataaaaataggcacacagaccaatgaaacagaagagaaaacccagagataaagccaaatacttacaggtaactaatctttgacaaagcaaatgaaaacgaaacagggaatggacactcaattcaacaactagtgctgggataattggtgagccacatgtagaagaatgaaactggattcttatctctcacgttataaaaagtcaactcaagatggatcaagacttaagtctaagacctgaaaccacaaagattctagaagatgacatcagaaaaacccttctagacattggcttaggcaaagacttcatgaacaataactcaaaagcaaatgcaacaaaagataaatggatgggacttaattaaaaaagcttctgcacaacaaaagaaataatcagcagagttgacagacaacctacagagagggagaaaatgttcacaatctatacatcagacaaaggactaatatccaaaagctacaaagaactcaaacaaaccagcaacacaaaacaaacaacgccatcaaaaaatgggctaagacatgaatagaaaattcccaaaagaagatatacgaatggccaacaggcatatggaaaaacgctcaacatcactaatgatcagggaaatgcaaatcaaaaccacaatgcgataccacctcatttctgcaagaatgaccataataaacaaattaaaaaataatagatgttggcattgttaccatgaaaagcgaacacttttacactgttggtgggaatataaactagtataaccactatggaaaacagtgtggaaagtccttaaagatctaaaagtagcctaacatttgatccagcaatcccactactatctacccagaggaaaaaaagtcattatacgaaaaagatacttgcacacacatgtttatagcagcacgatttgcaattgcaaaaatatggaaccagcccaaatgcccatcaaacaatgagataaagaaaatgtggtatattatgttctcactcataagtgggagtttaacaatgagaacacatgaacgcagggtggggaacatcacacaccagggcctttcggggggtgggggactgggggagggatagcattaggagaaatacctaatgtaaatgacgagttgatgggtgcagcataccaacatggcacatgtatgcctatgtaacaaacctgcacattgtgcacatgtaccctagatcttgaagtataataacaaaaaaagaaaatgtggtatatatatatatatatatatatatatatatatatatatgccataaaatactactcagccataaaaaggaaagaaataatggcattcgcagcaacctggatggaactggagaccgttaatctaagtgaagtaactcaggaatggaaaatcaaaccctatgttctcactcatgtgggagctaggctatgaggatgcaaaggcataagaacaatacattggactttggggactcggggggaagggtggggttaaaagactacaaattgggtacactgtacactcctctggtgatgggtgcaccaaaatttcagaagtcaccaataagaaacttatttatgtaaccaaatactacctgttccctaaaaacctattgaaatattaaaaaaaaaaaagaaaagaaacaatacagagaagattagtatggcccctgtgcaaggatgacatccaaattcatcaagtgttccattaaaataaataaataaataaaaatatatatttcctcctagtctatggctggcattttcacttttttaaaggtgccttttgataaagctgcaaaatgaagtctcagaagctcttgataatcaagagtaagattagggagcatagctgggaggacattgcaatattttaagtgaaagacatgatgatggcttggaggtagtgaaagcattgtaaggaattgatcacattttgattatatttttgaagacagagcgtccaggattttgctttagagagaaaaagcaaaaagtcaagaatgactcctacattttttggcttccacaattaaaaatctaaagcttccccttttggaaatggctagcaatttccctttagaatgaggcacttgccagagtctccactattccctattactcctggagaataaggtaaaatgtcagttgccatttctcatcatgtttacactactttttcccccctttacctaataagcttctctcatttacaatgccagcctgactcctagacacctttgattttataacactagctataaagtgccctagatttggagttaagaggcaaagtcttcagcctcagctgtgtgtgatactgggcaaattacattaatttctaagactctgttttcctatcaattaggtgcctctcttgcagggtatgaaaagaaccaaattgaataaattgatataaaataataaatatttagcctgcctttcctatattggaaaaatacctatgattttactgtttgttctcatgaagtcaaataccctgcttcctcttttctgtaatacattcctacttgatctgtctttctccagtccctccttccaatgtagttaccaccagatattctatctaataaatcttttttggtttcacttgtcccagcacactttgctgccacctttgatttgactttgacctggctttgatttggttctgttcctccatggggcagcccttagcctgtatttctgtgccacaaattaggcatctcctttacaaatgtcacttctttactaactacccctgccactgacaatgacctttatcctctgatctccagcagcacttactggtttcgtgggactttttaattgtttcctattctttcaaagtgttaattcattacgggcagaagccatcatgtatttcttttaaaccttctctctcctaaaggtgccaaaatgctaaacatggagtagccactcaatatacactaaactgaattctgaaaccaatttactacctgctttttcctatgccacggaacagagtcttaaatgcaaactacaacattggacccaggcatatccaagttgaaatattgtctctgcctctcagttttctgtgagaccatgggcaaaatggccctctgagctccatttccttgtagggataaaagagcctgttgaagatggttgtttggggtattaaattgaatagataaagtgcctggctcaggtaagtatttagtaaatatcaggtccttttcctaaacagctttattaaagtacaatttatttttagtaaatgtagactattatgcaaccatcacaacagtccaattttaagacattttcattgttcccctgcccacacaaaaaagattccccataaccctttctggtcaatttttgctcctacccccagcttcaggcaatcactaatctattttgtgtctacagatctgcctattccagatattttgtataaataaacttgggtcatatgtggtcttttgcatctgcctttttattttttttcatttagcagatgtgtttgaggtccatccatgttgtagcaggtattgttaagacaaggaaaacactttcatttctgcttctttaaaaaaggaagaatattcatctccaaaggtttaggagaaagtaggcaatgttgttggatctacttggatgcgtatcaaagttgatatgtggtcagatgtcatctgtacaaaacaccttttgttttttctaggaagtgtcctatgcatttcaaatacatcttggcacacatgtgtgtgatggattatttcaaaatattgtattgtccaatcactgtgaatggaccacacactaaatatcatgagaacaaaaggactgaggaaatcagttccagtaaattaagatccacttagatggcactcccctgagcaaccttcatttgaacttgactagaataattataaggttttgttcaattttggcctcagttgtgcacatctcactaatagcagaaatagcaacaaatatttttttcagtctatattttttcttgtacacacataatttatgacataagtcaaagaaaatacaccttcattttaattattgaactttactaagtatgctgttttcgacaaggaagatctctttaaagacaaacttgatatgacattggaatgaagcatttgagaggctcattcaagcctcaaactggaaggagaaaaaaaaatcagagttttgctattgaataccatttaattttgtagagaaagaatttcctacatggcactgtgaaagagttaacatgcttatgaaagattcaagaattttcagtgaaggagaaatgtattgaataggaaaattgtcctattcaatattcctaaaatatttactattttctcagaaatatgtggcagcataatgttatcatttttaaactgctaccagtggcaatgtggatatcactgtcatctttgagatgttttgcaaatatttctttccctggccaagccacaaattcactttgtgcccagttaaatcctcataaaatagtgtctttgacaaatgattgtttttttccttcccaacccagagaaatgccagactgagctattttcacttttggtgggaaatgttccatttagactgacgcaaaattacgtggcaaatatcctgaggttcttttcttgtcatatggctgacttcagagttgtgaaaatgacctgacaattgtaataaaatatagctaataatagtacgttaacatctttcactttattccaagcatgttacatcaattgtctcatttatttgtgtacagcaaatattttacatatagggaatagccaattgttactggtatacaacgctgagttaagtaggggaactgagatcaaggaaggctaaacagtttacctatgatcagtaaatggcagcctcattcttcaccatctttaatcattttatattagtctcatataattagactttgatccacctatttaaaaatattgaaaacattgataagtatcttttggggttatatacacaaaaattagtgtccctatatctaaaattttccctgcaaaaccatctacattttatgaatataaatgatatagaagattaattttaaagctgttgaatgtccgacatatattaacatagtaaaacttgactcgtaaatatactactctgtttaggcaaatacctacatacatgcataaaaagataggaaggaatcctaggctattaaaatcttaggcagtccttaagtggtgaagttataaaaggtaaaatgcctgtattacatataccagggaattagaataactttgaaaagcagtgtccctaacttgttaccatggtaatggagatgaatcttgattgggtggtgaacagccatggtacaggataaaggaaggagagtcaaataaggatggatgggcagcagatgttcttgactcactaatctattttttttaaccatgtctctttttacccacgatccatactgtatataccaactatcttagcctcgttgttgatccctatatatatcaaaaataatccatgaggcaatttttggcggcattcatagtggttaccaccatctccatatccatgctttcctctttaatacatttggatgagcttcttcatctccactccacctcatgtgagctaccacttttttacctcgtaacaaggagactagaactcaatgacccgagaacaaagtttgaaagacgggccattcttaatctagaaacggggccaatgaactgtttccgtaaaggggcagatgaacaaatattttcgggtttgcgagaccaagaggtctcgctcttctactcaacgaccattgtagtgcaaaagcagccattgacaatgcctacattgtcaatgtagtgtggtggtgttctaataaaactttaaacactggcagtgggccacatttggcctgtgggcacgtggtttgccaacccctggtttggaatgatgtaccccataattctagtgctaggcccttggtgaaaccttttagccctccttcatagtcacgcaaaagcagggactgtaagcatcccatgaacaagggcctcattgcagccgcagagcctggtctctcctgagtcttgttttggtattgtgtccttggatatttttgttcaacagtaccagaagatcaaatatcatcattatttttagcattctctctgaatatattttttaaactgtttgggaaaatgtttcgtctctagctaataaatgctgatgtcatgaaaaacaattagagtaatgttttcctcaacagggactaattgaggtcattttcagggggatattgtcttagttacatggagcagccaggcagtgtcagacttcacacataagtttgtttgtacaacgacatgtctgtggctactgggcttatgtttttaagagttgggtgtactctgccacacaatttggatttttaaaaattaaaggcttgcgtttggtagtttcagagggtttgtgtcatggaaagagagaatgaatgattcaaatagtaaacacatccgtcttttcaataggctcttatttggcacagcatttgaacacagccctcttgaaaggaataatgatggcctgagtttccacatgcctacgtgaccacatggcaaaaagatggacaacaatgtatccaagggatatatcaacaattttcagcatgagaattgttcagggaagggctcttggcagagatctgaagggaagcttttagtgtagcttccttttcaaatcctaaatcaagccaccatgctcagtctctcactttaataagcactaaatccacatgctaggtttcaaaagaaagaaaaaacctactttaactgctaaaacttccctgaaacatactcaggggaacagggcacatatggtgttgtaatttttttaaagcaagacatctgtagtattcgagaaatggctgaaatctgttggatttcagaaacttttataagctgaactccaaaatagataaattatttttattagactcagcaatggtcaatttgtgaagaaaattctacctgggaaacgacttttcaaaagcagaactttggtagtgtatatgtttagatcttgatttcaaacagtaagtgctaagaaaattaatttccaatgcatgtgtgattgagtacagctgcaaagatcctgagcatagataacaggaaacaatggtgagcctgtcagttttcttgctgtgacctctctaggcagtatgtctgagtgcttggcgctgactattggttcaataaataattattgaacacctactatatgacaggcattgtgcgaggcccttggaatgcaacaatacacaaaccagcctgcacagagcttaaatctaaaagtggatattaaaaaggacagataattaattgactacaatagggtctgggaaaggaaacttacttaagaagctggcttttacctggagattgaacactaaatatgtgttggccaaggcaatgactagccagggagtctttcaggcagcaggaagagcatttaggcttttaggaaaaaaacatatgatgtgtttgaaggaagcaaagtgtgtttgcagagctggagcaaagaaaatgaagggagcagaagcaaataattctaggagtcatggataagtactagaggagtttggataacgcaacaaggatggaagatatcatctgcagaatccctatctccctttgctgtggtttgaatgatggtgtcccctccaatattcatgctgaaactcaatctgtaatgtaaatgtctcaagaagtgtggtctttgggtggtgattgggtcataacggaagtgccctcataaataagatcaaggcctttataaggaaggcttcacacatggtttggccctcttgctcttcgtcattctctcctgtgaaacacagcaagagggcccttaccagagaccaaaagccagttccttgatctcggaccacccagcgtatagaactgtgagaaatcctttttaattgtttaaaaattacccagtatgtggcattttgttatagcagcacaaacaaagacaccctttaagagtggatttccccaaagcactttggaaatatatagatatctgtatagatagatactgatctctctttctctctctctatatatatatacacacacacacatatatatggctctctctctcactgtctctctctctctctcgctatatatatatggcactttctatctgaaaatagagtatatttcagtatatatataataatctttatattagacatataaatatatatgtatatacacactgtctttactcagagaaaaagaaacaccgcaatggactccaaatatgtgaatgcaatgattaagccattctttttttttttttgagacggagtctcgttcagtcgcccaggctggagtgcagtggcacgatctcggctcactgcaagctccgcctcctgggttcacgccattctcctgcctcagcctcccgagtaactgggactacaggcacccgccactacgcccggctaatttttttgtattttttagtagagacggggtttcactgtgttagccaggatgctctcgatctcctgacctcgtgatccgcccctctcggcctcccaaagtgctgggattacaggcatgagccaccgcgcccggccgattaagccatttcttgagtcattgaacacaaaatgtatgctatggcttctgtgttatgtagaaataagtaaaatcaattagtaaacagattatctcagaagaaatggtatcaagaagaacaagtatgctacgtgaggtataggtgtctggtgcactgagaatcatataaaaacgtgcagatattccaaatttttcataacgatgaactcctttttaacaagaaagtgactaaaactactttccaatggaagcaaaatcaattaaaattgctctggaacagagaagaaaaaagaaatctcaccactctaaaattgattttcacttttcagtttttgtaaattgttgcccagattggtatattttacagtgacaatcatgtcttctttttaatgttttttgacttaaagttactttctatatttcaaaagattctgcatcattatcatttataataactgcaaacacttcaactcaaaataattgtgacttaattctgattatgtgtcagtgtgggatgattgagaaagttgtttaaaaaggaaaaaggttttctgcactaaggtttaatgtaggcttaaatcactaatttaagtaaaaagaaatgagccattttaatgaaattgctggaatagtatacagtcatttactcctaaaatttagcaaacccagaatgaatgcttatatttcagtaatctgagtgtttgttccaactactaattatttaaatactactgattatttttaatagtcttcattttttagagcagttttaggtccacaacaaaactgaaggtaagtataaagagtctccatttgccccttgcccccatgtaggcatagcctaccctattatcaataacctccatcagagtggaacatttgtaacaactgatgagcagatgtactaatacactgatgcattattaacacccaaattccacagtttacattataattcactttgtgtcatacattctctggatatggaaaaatgtataacaacatgtatccaccattattatactattatattataaaccagcatagtcctcactgccctaaatatcttccacactccacctgtttacctggatatgcctgctcaccccttgcaacgactgacctttttactgtctgtatagttttgccttttccagaatgttatctagttggaatcatatagtatgtagcctttcaccttagattctttcatttaataatatgtgcttaaatgttttccatgtattttcatgacttgatacttcatttattttcagtattgaattatattccatcgtctcgatgtaccacagtttatttatccaccttcctaccgagagacaccttagttgcttttaagttttggcaattatgaataaagctgctatgaacatcagagtataggtttttatatggatataagtttccaacttatttgccttaataccaaggagtgcagttgttggttcataggacaagagtatatttagtcttgcaggaaactgccaaactgtcttccaaagtggtggtaccatttttgccttcccactagaaacaaatgagagcttccattggtccaaatcctcactagcatttggtattgttagtacttcagatttttatcattctaatagatgtacagagctattaattattctttttttaaaagaaacacaaaacaaaagaagtcctgctgtagcaaggacttgaaataattttgccagaattctttcttagcagttggttgttttcatcatgaaggcaaaaagtattgataatataatgaaactttatttcttgccacctaggagggaagataacagaccatacagttctttttcttggtgttctggtttttttttttttttttaacctttcttatttaacattttttatcaggagtatggataaaaataaagaaaataatgataaaacgtgcaattgactcaacacacactgttcggttttctctgtctttaggccacacccatcacatttgctcttacaccgctgtgaaaccgcttttatcaagatcaccaacaactccttgccaaatccaaaaacgaatcacctggcctctctttactggactttggcaggttccatatgccacactcacttataactttattcatctctctgaacacaatgaacatatcttctccttctatgaccctcactacactgtgtcttatccagctctaaacatcagagtccaaaggactcagccatagaatctctcctctttgctaaatacacttttttccctaagtaatctcattcaatcctatggatttaaaaatcatctatctgctgatgagttcaaaatttatagctctagtcctgaaccttccctgaactctaaactcataaacccaactctaaaacttaaaatacacagaacaattgattcataaatctttttttcacacaccctcttccacaccctagatgctatattctgcagtttcatgcttctcagaaaatatttattttttctgttgactgacttaagccaaaaagttcaaagtcagctttcatttctctttctcactgaccattctcaatagacaagtcgatatatgtttttacagctctatcctcaagacatcccaaatgtttctattcatcaccgtctcctgccaagcagtcactgtgtctcacccaaactgctaatgctgttcacctgtctttctccttccactcttgtttctatatggagcagtcttcacacagcggctggagtcacatgacatatgtaagaaatagactctctgtctccgttttgatgagacattaacatcaggtaccaaagcaagtgtgagacaaatcctcacgtgtagtttttcaaaagaaaacccgaacaccttgctgcaaggatcttgcatctccctcactcattctgagcaagagtccaagagaaaaagagtttgggtctttgcctcttgtccaatagagtttccagggaaaaaaagaaaccttcagcagaaagaacccagatatggacttccagatgcccaggaacttggcaagaatgtccaaagattactaggaatagaagtgtaaatatctctaccataggaaatataggaaacacaacagtatctcatgagaaaaagtccctgtttaagacccaaagaatttgaagccacccaaccaagtctcatccacctgccatagctatgtgaaggtggcaggtcaggggagataagtcaattttgtctcttttccagttcagcttcccatatggtgtcagcactgggagacagaatagaaatgaacatcagcactgggagacagaatagaaatgaacactcagtcaaaactgggatttggattattacacagggctggacacttcctgaagtgtccagccttcctgaagtttcacttccagagtttcctgaagtgaaactctgtttgcaatttaaggtaattatagaactgtctattactaaacagtgagcaggaaagttttggcctgccagttttcctccaggatgagggtaaaactattcccattgactaggctttgaagagatggtgggaattggcctggagcagtggctcacatctgtaataccaacactttgggaggctgagacaggaggattgcctgagtccaggagttcaagatcagcctgagcaacaaaatgagactttgtctctatagaaaattaaaggaaaaataattagccaagtatggtggcccatgcctatgttcccagctatatgggagactgaggcaggagaatcacttgagcccaggaggttgaggctgcagtgagccctgattgtgccactgcactccagcctgggtgacagagtgagaccttatctaaaaataaaaaatgaaaataaaataaagtgagaataacgtataaagatagattttgttaccagttatacttgttcaaaagtctagttatgtcatctattaaaaatttaaatcagattatgtctctcctctgtaattccccctaatgccttacattgtatttagaataaaagacaaactgcaaatctatctcatagccttcaagattcgacatgatctggcccctgttgactcctcatctccaaccatttttctctttgcagactggtccactcacattcactttcttttcatcccttgagtgtgtcaagcttatccttcctcggagacttccctgttgctgttctctgactctgtaatcttcttttagatacgggcaaatctgccacctcatttcttttccgactactaaaacatcactttttcagagcgctcttcctagatttcattatctgtcactctccccacattctaccacgagcaccatggccctttgttaattgttttcataccacgtatcactacatagaattatatatttttattcattggtagattatatgtttctcttttactaaataattgccttgttcatcactgtggctctagaacctagaaaaatgcctgggatacagtagactctcagtaattcttgtcgaaaaataaaagtaactgtaaaaaactgaactgattttttatttatttttgagatgaagtcttgctctgtcatccaggctggaatgcagtggtgcgatttcagctcactgtaacctccacctctcaggttcaagcgattctcctgcctcagcctcccgagtagctgggattacaggcatgcaccaccatgcccagataaattttgtatttttagtagagatagggtttcaccatgttggcgagtcttatctcgaactcctggcctcagtgatctgcccacctcggcctcccaaagtgctgggattacaggcatgagccaatgcacctggcccaaatttattttttaaatacaagttatacaaaatacatgttcttcttaccctccaccccttgttatgatctaaagcaggtttctcccaaaattcctacaggaggttgaagtcctaactcctagtatgtcaaaatatgactgtatttggagacaggaaattttattttagcactcagggaactacaaccaggagcccaacttgttttggattggggttggggatagacacgaagaggtggggcaggaagaagaaagggctggttcattttacatatacatattttatttataatatatctatgtgcctgggcatctctatgctgttatcataaaatctgaattgtacaaataaaaagttcaattccgggcaaaaattattaaattaaggccattagggtgtttcttaatccaatctgaattggtgtcgttataagaagaggacagtgggacacatggagagacaccagatgtgtgtgcatgaagaaatgatcatgttgtaaaagacagcaacagtgtggccatctgcaggctaaggaaagagacttggaatagatacttccctgtggcaatcaaaggaaaccacctctgctgccagcttgatcttggacaaccagcctccaaaactgtgagaaaataaattcctgttgtttaagtccattctgtctgtggtatttggttatggaagcctaagctgactgtttcaggaaagctctttctaactgtgtgtttcctctgctctcacaccactgacataggagttaaaaagaaattatttaggcagatagtgaaggtaaggaagtccttggttacgttttccttttaatgaaaagcgttacccaaatcattttcttttctaacaaagagcagcccgtaaaatcgagccgcagacagagacaagcaagctgcaagcttgcacggctgaatgctggcagttgtgccaataggataaggctacctgggactaggcatgttcaaaatggcggctccatcttcccttttcctttccaactatgtgtaaagtagggagcagacaacatggcgccaatcaagtggaaagccaacttgcctaataagaggatgagggtggggcagccagctgccctttgggttataaaggtcacacctcgtccaaccaatctttgggccctgtgtaaatcagacaccacttcctcgagcctgactaaactccagtgcactctgctgcaggccagaagtctcattcaggtgcccctctctgtggcaagagagagagctgttctcctttccctctctgttgcctattaaacctctgctcctaaactcacttcttgtgtgtgtaggcatcctcaattcccttggcgtgagacaatgaacctcgggtatttactccagacaatgacactgcttcaccaccacaaagatcatcaacacagaagatgacctttatgatcaaaggtgtgggggattttcccctaacaccaagcagcagacaccagctgggtgttctccaattcagctccaacaccatcttcctgaagatagcattagatcccacaagatgagggtacagtctcacaggaccactttcctcctctcacccagtcacaagtctgggcctctggaacttctgactgactggcttcaccgaggttcccacaagcccttctttgggttaatttaccagggcggctcatagaactcaggttaacacatttacaggtttattatgaaggatattttaaaggacacgaatggggctgggggcggtggctcacgcctgtaatactagcactttgggaggccgaggcaggtggattgtctgagctcaggagtttgataccagcctgggcaacacagtgaaaccccgtctctactaaaatacaaaaaaaaaaaaaaaaaaaaaaaaaaaaaacagccgggtgtggtggcatgcgactgtaatcccagctattcgggaggctgaggcaggagaatcgcttgaacccaggaggcagaggtggcagtgagccgagatcacaccattgtactccagcctgggcaacagagcgagactctgtctcaaaacaaaaacaaaaacaaaaaaagacagaaatgaacagccagaggaagagatacatggggcaaggtatggaagcttcccaagtgctggagcttctgtctggtggaattggggtacaccacttccccagcacgtgcatgaattcttctttaccttcctgtcagcctccaactgttcagctctccagaagccttcccaaccctgtcctcttagatttttatgagagcttcattacacaggcatgattcattatatcactggccactggtgatcaacttgaccttcagaccctctcccctctctagaggttgggtggtgggtggggctgaaagtcccaaccctctgatcctgccttggtctttcagttgaccagccccatcctgaacctatcagaccaaagatacacaaaaggcagcactttggagatcccaaggcttttaggagttgtatgccaggaaatgggaatgaagaccaaatatgcattccacaatatcacacagactaatacacttcctcccccctgccccaactttatatttccacagttctaccaaacagaaattaaaaggaactaagaatccataacatcatcatcagcagcagcatcatcatcatgacaagtatgggatatgtgaggacctctgtaggttggaagaataggcttttttgactacaaatgactaacaaagtgacttttaaggaaaaaaatagttttattgtgagaaatatatacaacatcaaatgtatcattttaaccggttttatatatagttcagtggcattaaatatattcgcaatgtgcaatcagcaccaccatgcatctccagacttatcagctcaaacggcacctctacccattaagcactaactccctattccccaccccctcagcccctgataaccaacattctacttcatgtctctatgaatttgactactctaggcacctcatgtaggtagaatcatacagtatttgttcttttgcctctggcttatttaacttagcatagtgtcatcaaggttcattcatggtgtagcatgtgtcagaattttattcctttttaaggctgaatgaaattccattgtatgtataagccgtattttgtttatttgttcattgtcaatagacatttgggttgatttcagctttgggctattgtgaataacactgctataaacacggatgtcccagtatctatttgactctctgccttcaattcttttgggtatatgtttaggagcgaatttctggatcatatggtaattctatgtttaatttttttttctttttaggaaccatcatattgtcttcccagcaacaaactgacttttaactgtacaacagtaattgcaaatctgtgtggtccactttcactgtgccaggtcctttgcttaggtgccttatattgctttcagttctcataagagattcacagatgagttgcaggagaggggcccaaactgatacattagtgagttgcaaaacctggacttgagttaaggtctgcttgactccatagcctgtgccacaccttatcaaccacgatgctctgttactgcccagggttattggaacagggttgtccagagatgagaaatgcagtccacatgcctattggtgacttactttgtaaatagtttcatcttataagcagatggcatgatgatatagcatatcaagacttcaagatatcaagatccaaggacacccttgaaatcatgaaaggctcaacacaggaaaatagtttacatgtatctcatgttttccttgcaggaaaggaaatgatgaattgttctttacataagagattattatagtccctgttctgtgagcaactgagccttttttttttttttttgagatggagtctcactttgtcacccagaatggagtacagtggtgcgatctcagctcactgcaacctccgcctcccgggttcaagcgattctcctgcctcagcctcccgagcagctgggactacaggcacctgccaccacgccaggctaatttttgtatttttagggtggagacagggtttcaccacattggccaggctagtctcgaactcctgaccttgtgatccatccgtctcagcctccccaagtgctgggattacaggcgtgagccaccatgcctggccactttttcttctttaaaattgacaaattacaattgtatatatttatggggtacaatgtgaagttttattatatctaaaatcaagctaattaacatatccatcacctcgtttattgctttttgtggcgataatatctaaaatctgctcttttagcaatgttgacatgtacaatacattattactaactatgcttaccatgctgagcaatagagcactaaaacttcttcctcctgtctaaccactaaaactttgtaccctttaacagcatctcccctttccctcctctctcatgccttctctagttgaaggtcacctctgaacttctgaatcggatggtcagtgtatgagaaaacacagatgagaaactgtttcttagaataacagcagatgagccaatgtgttgatacatgtcatggagaggtggtaaaaaggggagaaaaagaaaaccaagcagcctcaccaggtagccactgatgagattacctattcctccaaatgcatccaaagcagaccctccaacaggaacaatcaagacaaatggaggtctccgtaaaccccaggaaggcatttttccacattctaagtaagaattattgcatcaaattattgagactcagacaatatgccaagaataaacagcccaaagaggaaatctcagtgtatatgactcactgttttgaacaaaaattaacatcggctagccagcgtttctctttgtatcacttttccagatcaccaagaggttatataatacttcaaagtagccaatagagatggaataaaccacctaaactgtttagatggccagtttctttatcaacggcttcattcaacttagtatttctctgaaacataaaataaatgttttgcaagttttgtaagaggctagtcctactctgggaaatacagaccttctcagttgtactctgaggagaccttagaatggagctagagagcatcttttcatatcaatcaacttaaaatcagctgtagctgagcatgatcagagtctcagagagaaaacaagttttgcaaatgtcaaaagagcttcttccttagaagcttttacatacaatggtccattgcaccaaaataagtgatatattagcaggtcttcagcaatgcaatgacaaatgtaaataatataaatttctccactgagttctttaagttcaactttttcctgagaattaccaaataattatgctaaaattattcagcaaattcaagcccacatgaaaaataatgatctgactgatctttaaaaagagggttaataagttttaaactaagtcctgcctagacctagactttacaattcttcatttttcaggagagtcacatttatgttttatttccatactctcacaataagatgtaaatgagaaacatcatcccttttttttcttattgcaatctaggtgtaaggatttcagaaatgttgctatttgaggtagttgatgaatctgaggggatatagtatcacagtttatggataaggatcactgagtgatctagccaccacacatccctggggtttacatctttattattatgtgcccaataatcttcataaatttcagtagactgtgaatgttttaatcacatactatgactgtagaaccctgcactggttgtggcaaaagtaaacgtgtgaaggcacatattggaagaacagaggatttataggagaggatgaagagacttgataaggaatggtgaatggcaggagagcataagggaataggattcagtgcttgcaacacaagcattaattagcaacccctgaaaaaccattgagtaaaatgaatcctcaaatataaaaacaagagccaaagtgatgggaaaataaatatacgtgtgtgtatttttgtacctagtaatctacattaccatgtgttaccgtgtgtatgcacacacatgtgtgagtgtgtgtgtgtcatcattccaggtagacccattcaatgcagataactggaagacataatttctaagatgaagtcaaaaagttaagagaacaggaaagaagtcagagaagaaaatgaaagattagctaggtcatggtttgagtttgcttagtcaattatgaatccccctgacctagatttcttttcctagactattgatttagctttgattccaaatgctctcttggttgccacttgctttagaaacagaaccaaacaaaatgtccattgatttttctcatggtcagtcccttcctgaggtccttgcagctaatcagttactacctcctcctccttatcttatcggggctctctaatttcctccattaagagatgtctgactgggtagttgctgaaatctttcagtctgggtacataaggagattaaactgagtcactgagttcccttgatcttctctgcttttccttgttgaaggcgtgtctctgtttactgtgaaagataagggggtgccgacaaatcaagaatagaaccttagaagatgcaaaggatttagagattcctgttgtgtatacagtaggtgacaagaaaattccacatgggaaacaataaagggttcttcaactatagctcattatacccagctttgaaaaaccagagagctctgatggtgtctgagggtgtaaccagactccagcccttttaaagagtagtgattacttgaagtgtttctgacagctaaataaatattttctaaataaaaatatacatgctttaaatggaatatcagaaccatttttagacatgaggattgctactctgggattccccagctgccaggttctgttttcagtagaagctgctattttactgactgtcacccgctgaaagctccactatgtccaacttaatggcatcttagttgaactccacgaggtctcaagcttcaagaagcactgcaaatttgaacaagcactatagattagaaaggtacattttaaaagctttgtgaaaatgtgggcatgatcccagatttagagcctgagtaatgagtaataattggcagcagagagagacagagggaaggggcacgcaatcgagttccagacaaagagagaaatctttatcctgcagtaaccagtcataataatggcaaggacatgggaaggaaagaaatcaatgtggcagcattgaattttttttcacaagactgaaaagaaaaagagactaggaaaaaagtatgaggaaggaattataatcaaggacaactagaaaaatttacttatttctgggtacttaatgcccagaatgacttgagagagcatgtgtgtgtgtgtatacatacacacatatgcacatattttgaatgtactcatgagtatattaaaataatatacacactaggtaaaaccttcacatagcataaaagttgctgatatcctttcaccattttacagaagaaatcacttacagtttcttgtatatttttccagaaaatgtttatacctatacaagtacaacatgtcagttattctcaaaaggaggccatttggcctacaggagacactgaagcccatatccaaggtagaaaatagaaataaagtaactatttgcataagtgacttccaaaatatctggaacaagatgctctgtaatatacaaagatgtgatccatttcaagacaattatcagaaatgtttgcaatcatgaagaacagtagccataagtcagatctattttcacttgtcagaagagactcgatgacttctaacaaatgcatagtagaatcagaatgtctctcctttgaaaaattcagaaacaggtaatcacagggtttatagacggaaagagtatgatcaccactagaagttaacaagggccctaaagaataaatcatcgaaagaaacttcatttcatactttagtaaaataaaaagtacagatcaggtgaaatacatataattttattcaacaaaatatttgacagtcaaataccctgtcagataaatataatgatagtgtaattctcagaatatatgaaactacagatttcacacctttttctaagtgtgttttcatttttactttatcttgaatatattctactgtcagatgcataagaaactcctaacataaacttaaatgtgaaaggaaggaaaatactcctattaaaaggaaacttcacacaattctttgataagataaacattaaaaaacacaaagaaacctgttaagaatttcactgtagtggttttaaaaaaggtatcaatatctttcttttggatcattcatgttcctaggcggaaatatttatttagaaggacttttctcatattttaccgatatcatcctgagaatccaagtttagaaagtttaaaaagacctcttttggcattttaatggactgtatgtcctcatctgacaggtggcaattaggtctgtcttacctggttactcatgagaccgaaccttgatacaaggctcataccactaaaactgctgtcaccaagatttttttttttttgtcatggagaattatactagtattttgctattgcagttcatttgtggatgaaaaataattgcagtaataatagaaatgagagtcaccaagaagcattgtatagttttgaataatcccattgacagtctagatttgatgtcatggtttaatgagtggttgttattttttcccctgagaaaatgaataatgcctcttctgttagaaatgacttttttgcaactgctatttacataaaatctaaaagcattcacggatttttaataaatccagagacttatagcaataaaatagaaggaaagagggtgagataattgaaagttaaaggggagaatctcctttttggagaatttaagacatccagttagtttcttttgattattcaggtcatggcccattcttaaaatgagttctatttcttattagagctttccatgacaagtagactttaaggccagatacagtaaagctccacaaatttccagggctttgcatttgacatttgtacaaaccagagggtattattttaccattgcctcccttgcttaaatgcaaagctgtccccgttttcagaccaagtgtatgatgagaaatgatgagaacttaaaactcggtgaaaccgagttatttcatgaaatgctttctcatctaactaccgtgatgtaacttcaggaattaaaaaaaaattacttccaaagtattagaaaataagaaaaaaaaatggaggaaccgtaactcccatgccaggttaaaatgttacatatcctatgtgccttcgtagcaagtaactcgggaaggtttaaaacagcaattagcattaacaataaattttttagaagcttgtaattttcaagtataattcacccatcctgttccaaaatacaattaattccagaaattgaggttcagcaggtctcccttttatcttcagatttgctttgcagtttctgttacccatggtacagtacaataagattttgagtgagcgagagagagtatgtattatagtgtgtttttgtttgtttgttttttatgaagctatctcaaacttccgctcttctctttcagtttatggtaggaaaagatataactattttattttttaatgtattaacaatcgaaggtttcttccaagagaacaatgattcaagttgttcaatctcatggaagtagagaatagaatgatagataccagaggctgggaagggtgtgtgtgtgtggaaggggggatgaagacaggttggttattggctacaaacatacagttagataggaggtgtaagttctaatgttccacagcagagtaggatgactgtagttagcaacgacgttttgtatgttataaagtagctaaagagagcgcttgaaatgttcccaacacatagaaatgataaataggcctggtgcagtggtttatgcctgtaatcccagcactttgggaggcccaggcaagtggactgtttgagtttaggagttggagaccagcctggccaacatggtaaaatcccatctctgcaaaaattgcaaaaattagctgggcatagtggcacactcctgtagttccagctactcgggaggctgaggtgggaagatagcttgagccaggaggtggagggtgcagtgagccaaggtcacactgacagagtgagaccctgtctcaaaaaaaaaaagaaaaaaggaaagaaaataaatacttaaggtgatggataccccaaataccctgacttgatcataacacactttatgcatgtataacacactctatgcataacacactctatgcaggtacttatatgtaccctcatagatatgtaaaatattatatattaattttttaaaaagcaaaactttgtacatttctgctcttttggtccaggcactatccattcttttagaggagaaacccttattcacatctcccctaccccctagatattctagagatcatcatatgaagccagggccaaacttatgaacaggcagcccagatctctgtgacctggggggcacccagaaatgcttaagggctgcctacccatagatttcctcccattgcttggtcctggagtcatcagataatttattttctgatggctttttaggtttctaagccccatattaaaattccaaaacctctatatgaatgcctccgggagtcagaatgctttaagccatgatcacaaacacctaaagggaagtagttgaaaaatgagagcaagattaaaacctgatggggtgaggaatgaaatgcctgggaaggggaaggagaggcaccaaaagaggagggagggtgccaagacaaatcccacctccctgccaaatgtctcaatggtactaagtgaagtgagcggtgcttctgcttacaccaagcatttctgaaaccgatactttccatgggaatacaaaaaaaaaaaaatgatattgcagtattcatgtatattcatatatacattcattgaaacataatcaaaaccttcccatctcaatttggaaattggttcacttttctgcagttgctagtggcatcccagactttatttgagattgttttgctggtaaactccctggtgatagagcagagttctgtgatcatgtgggtcaattttagaactcttcccatattttctgatgcaaccaagtggaacaatgttgtgtcccagtaaacatggaaatggagcaagcaaaacattactgtctacttctgaaaatgatagacctgatcggaagtcgggtttgaatccaggagcctgctgtcagtcttcatttcaaattaggtctcttaacattatgtttgcctacagatgaaaaaattagcaagaaaacaggagccagctatgcaaaacccagtatgtactcagttgtacagattttggagaggacagatgccaaaacaggctgaaaacacatctgatctttagtcattccagctgccctttctaggcagggaaggctgaatttgatctcctgctatgcaaatgtcttccttttcatgctgatctttctggctgggtggcagagaggaaagatccatttcttgttactgaatcactctccaatatctgaccttgaggaagcctttaatatctctggatacctatttcttcacatataaaataagataattattttaggtaatggctaaactcttgtgaacatgttactctagggaaataaggacttctgaactttagactcaggaaaagcatacagatttgcttggagccttaatcacctacaataattaaatcataggtatcaaaaatcataagcttaaccactaataggaagcaaataaacagtagtggactgtctcagataaataatttagagaaggaatgatttagggactgacagaatataccagacatcaatatttccactctcgttaaaaatttttaaaatgatcattaacaagtaatttacaaaaactagacagattcctgcaggagaaaacaatttacgtcaactttggaaatattttcaaagtatttttatttcattattaaatcccatttaataataaagtattagatgaaaagattttgatggggtcgaattaaactaaatttcgaaaatcctgataggtgaaaagatgctacttgcctgtacctattgcttgctaagtgaagtttggaaaagttttgagtggagataggaagtaagctttccaatgtcagagttagggattgacacccatgaacttgattttctcagccaaacatgttactcagtctagacctgtgcttaaggtagactttttgaactaaaaccctcttagaagaacactctgaggcttaagtcaatatatgatgattaaatgccttggcatttttaagtatttcactaaacatgggagattaagaaaagcaggcaccataaatctcctcctccctggcctacatatagtctaataatagaattaagaatttggaatatcttaattctttcaactggaggaagatgaactcatgtcaccaggttacatctttcttcagacacttttacttactcaaataaagcagtttaaggctgctctaagtagaactagctatttcgcaagttaaaactttctcctgggctgggtgtggtggcttattcctgtaatcctagcactttgggaggccaaggcgggaggattgcttgagcccaggggttcaacaccagcctgggcaacatagagatactcccatctctaaaaaatattaataaattagccgggcatggtggtgcatacctgtagtcccagctactcaagagggtgaggcaggaggattgcttgagcccaggaggttgaggctgcagtgagcagtgattgcactactgcactccatcctgggtgacaaagcaagagcctgtttcaacacacacacacacacacacacacacacacacacaccccaccaccaccaacaacaacaactttttcctggaataaatatctataagatagaggtggaaagcttatttttgtcaagtgttctcttattgttagtattctttcaaagctagcatggtaaacaagtgttggattttgttgtgtacaaagttggagtcatttcttagtgctacactaattcgttaagaggctattggtcaatttattaatttccacaacttctttttgttcttatttggtgaaatgctctcaataaaacttgaaagcggcgagtatgatgaaaaacaacggaaaacaaagtcattatggtttttagaaaagtctcctttggtggcaacatcatcaccatttggaagattaaaaccctgtagctataacttaagcagacaaaattatctgggccgggactaattcttccataaagggttcactgtggtcttctttgctacaggtatctcatgcctatctaaagccgagtgggtgtgaggggaaaggggatggtcccgtatgtataagaactcaccccaccagggtggtcaattgtcaagttgcaccttgtaagttaccttctcgtttttcagttactccaaacataagtcactgtgcccacttcggcatgagtagccctccttcccacttcctgcattaaaaactgtctttacaccaaggcacaaaaaataggacttgtgttctgtgcccactctttgcctaatatatggctaaaaacctaggtaaaaaatgactgataattgcaaaataccaacaattttgttttgacaagtcaagggtgaaacgtagaccctcatttccatcagtggagaccaaaacaacctgtaattgaaggaaaaatagttcaggggtgaactatcataaggggaaatgcaacagaaatgataattatgacggcttcaggttcaaattaatgatttgccctcattacagatatttatcaagttaagattttagttgaagtggatagctacctaaccaaactttcttacacttatccttctatattttcatgaggcgactaatgccaaacctctctggtctgaactatttcttctaacactcaaatatagccctagagaggctgactttggaggcaacgtaaatagcactacagtctaccacaaaatagaatgtttctgctaccagtctggtctttttctgaccaatctgatttgttcagtgggtattccaactgggatctaaaaggtggagaaaggggtgggagatgcttttttccccctaattccagaagacagattcattttctgctcctgtgaaaaagagctgaagaaacaatgaactgccctggacaaatgtaattgtcttatgtaaacttatttttatttttcaactgtcatgcattcgctacaataccttgctttagaaatttcctagagatctgttaaaggacaggactgtacagattaaaaaataaataaaagaaagaaaaggaaaggtaggttggggggagtcaatgtatgtttctttatttgtgatatattacaaaatcacttctcaactcggtgccaggacaatgcttggggcaaagggagagtttgttaggacaagactcttctgagtgctggtattcttttgtatggtagagaaagttcctttagttttaatgacgttgacaagaggtgggagaaaggcactcatgatttcccacaaaggtttcattgacaaaagtttataatttttgttcaaaagcacttcctaccaaacagcaagactttgaagtttattctttgttcagtcatgcttgttatggtttctttaagaagacagtgaccaaaaaaccctactacttttatagctagttctctgtacattaaaaaataaaaagaaaagaaaaatttaaaatacttttgcttaaaggaccacaagacaaatatcaaattctccctcaaggttttttgtattacacctttaattgctaaaacatagttaggtagttcatatatttccccactgtatacttagtttattccattttatgtgagtgattgtgtgtgtgggtgtgtgcgtgtgtgtgtgtgcatgagtgctattcagcatggaaaattagggcacagttccgtaactgctttcattttctagatctatatatttctgtgttcttccaagttcacacaatttcacaagagggcttaaaattactcttgctgagattttcaaacatatatatttttctatcattttgcacattgcaacagctttccaactcaaatctaagttaagctcaatgaaggcagtagtgtcattttaaattactgatttctggaaaagtttttctttcatttttttcttcctttttttttttttaacatattgctggaaagtatttaccacgtgtctaggtgtggttacttttgtagatattttgctttctttttgctgttaagtcatggtggtttaacaattgtttgagttgttccacccacctggcccccagctgtccagtggttctataaaaccatgttgaaagcttacagtgtggaatacaaataccagtcgaggaatcgaaagtgtcaggaagtgtcccacagaagagatacaaacaatgcacagatcctcttgtggctgaaggtggaaagctgtgcctttagtagaaacttcatgaacaattttacttcagaccacagacattacaaaatcacggcagatttccggtggcttgacattctgctcttttagccaagtatacaagatatattttgcttcttattaacttctctctcttttctttctttccttttcttttccttctttgtttcttttatttcctttctttctttcttccttcctttctttctttctttctttctttctttctttctttctttctttctttctttctttctttctttctttttctttatttctctttctctctctctctctctttctctctttctttttgggagagtctcactgtcacccaggctggagtacagtggcacaatctcggctcactgcaatctctgcctctcgggttcaagcaattctcatgcctcaacttactgagtagctgaaataagaggtgcacgtcaacacacctggctaatttttgtattttcggtaaagatgttggggggcggtgtttcgggggtggtttacaccatgttggccaggttggtctcgaacccctggcctcaactgatctgcctgtgttgggctaccaaagtgttaggattacaggcatgagctaccacacccagcctaaacttttctttcatattcagctttatactgtcaactacctccttttattattatccaccagcagtgatttttctggcatagattcaaggtgaaccattgccaaaaacattttttggcacagggtaacaattaaaattgataatataccaacatagtgcagagagattagaatatttcccggcactgctttcctgattatttcagagcaaggcaacaaagctgtatgtgctatttctttggagtggatgctatccaaaattattcctttggatatagtgttctgtcatcatcattatcctgggtgttgcaatattcatatccaaaatattttttgttaaaataattgtttttctcacctcatgctttttcttatttcttttctttgcagctgtttttaaattttaaaatgcagattaaaaggtaagttaggggtgttttttaaaaaggttgcagtaagaatacaagatgaggtagtaactggacacatttagtgcatttaagattttagtacattttagtaacttaagtaacactcaatgtagtttaaatttacctaaaaattgaaatactaaaatggagggtctggggaattgctaggagcaatggatgaatcaatagtcagagtgaacttttacagcaattcaaatatctgattgttctaaatgcatggtataaaataataccaccttcagttaagatgactctggccttgtcttttccaatgccatttttttttcatatccgagtactgtgaaagctggcatgtgtatgtgttggaggaagggaaggatggcctgaactctgaagtcaggatacctaagtttaaagcccaggtccaccatttgttagtcatgtggcatttgaccaactacatgatttctctgtgtttccagttcctcatctagaatcagcagttcaataaaagtccaataaaaaatgggctatagcctcacttagaggttgccctaaaggactatggtgaagggaaagccctcataatgaacagaattttgcctggggcacttggtcattcactttgtgtgaattttaaagtggcctgaaatggccgggcacagtggctcatgcctgtaatctcagaactctgggaggccaaggcaggtggatcacctgaggtcaggagtttgagaccagcctggccaacatggtgaaaccccatctgtactaaaaaaatagcaatgcagctttttataagagtcttgtgaggactaaatgagaaaatgtatgcaaagcatacaaaatgaactattattacactattgcagaaaaaacagtgacttctttcagtattaagtctcctatgatggctgttcttttagaaatagacctatttcaatgacaatcaaaattatcctctagaattttttttttttgagacagagtttcactctttttgcccaggctggagtgcaatggcatgatcttagctcactcactgcaacctccgcctcccgggttcaagcatttctcctgcctcagcctcccaagtagctgggattacaggcatgcgccactacgcctggctaattttgtatttttagtagagacggggtttctccatgttggtcaggctggtctggaactccctacctcaggtgatctgtctgccttggcctcccaaagtgctgagattacaggtgtgagccaccacaccggcctatcctctagaaatttaaatgtactccttttgctgttatgctaattgaagttctctgtagatcttttcactgtggaacaccaaaactctagataagactcactcttggagacattgatagtttcacaaaaagtatggactggatctagaacagaaggtgagaggattaccctgaaggcaaaagccaagcttcatactgccattagaaccctgagcttgaaccagctacagagttgtcaaaggcatttgaatcagagcaactccatcttgaatagaggctgggtgaaataaggcaaagcctgctgggctgcattcccagtaagttaaggcattctaagtcacaagaaaagactggaggtcagcataagatacagatcataaagaccttgctgataaaacaggttccagtaaagaagctggccaaaacccaccaaaactaagatgaccactagagtgacctctggtcatcctcactgctacactcccaccagcaccatgacagtttacaaatgccaaggcaacatcagaagttaccctatatggtccaaacaggggaggtataaatattccatcccttgcttagcatataatcaagaaataaccataaaaatgggcaaccagcacacgtcggggtggctctgtctatggagcagccattctctttattcctttactttcttaatgaacttgctttcactttactctatggactggccttgaattctttcttgcacgtaatccaagaaccttcttttggggtctgaattgggaccccctttctggtaacagagagcagaaagttgaagctggaactgtgatgatgagctgagactctgcagttcagcagagactttttaataccgccaaaatcaactaatctctagaggaaacatatccaatttaggcataaccaattaggccacagagatgaaattctaccaatgatctcagaatcaatatcgccaagctcatataaaggcaaatccctttaagtaaaatcagcagacacaaataacagaagagttggctaagtatgtcaatatcaataaaaaaatggactatagtctcacttggaggtgaccctaaaggatagtgatgaagggaaaatcttcctcatgagcagaattttgaatggggcacttggtcattcactttgtgtgaattttaaaatggccagaaatggccgggtgtggtggctcaaacctgtaatcccagcactttgggaggccaaggcatgtggatcacctgcggtcagttctagaccagcctggccaacatggtgaaactccgtctctactaaaaatacaaaaattagccaggtgtagtggcaggtacctgtaatcccagctactcaggaggctgaggcaggagaatcacttgaactgggaagtggagttggcagtgaactgagattgtgtcacagcactccagccagggcaataagagtgaaactctatctcaaaaaaaaaaaaaaaacacaaaaggcctgaaataagaatacacatagtctcatgggcaggggagtcgtaaatggcttgggtggttggataggaacccggaaagtttggaagattgaagacaagagtgctggcaaggaggcatgtggatgatctaatggtaataaacacaaagagtgagaatctttgcatttgtacatgaatgtcggacaaggcacaaagaccactgtgaaaaaaataactgagttgacagaatgacacagccagtagatattagccagcctctgcccttggacatctcagtgcttaagcaatggacttgtgtatggagcatctatggtgtcttagatggagtctatgcataggctcaacagcaaagatttttttctcaccaagcctactactggtagagggctgacatatgagcaatacagactaggactatggcccaccctccctactagagttcaattcctgccaaatgccagtcagccatttggtgacatcttggaatggacaatatttcatcttggtttgggttgactcatattgtggttatgaatttgcatttcctgcatgcagtacttcagccatcgccattcttccaggtctcatagagtatctgatctaccagcatggactcctacatgacatcacatgggacaagagacctgctttacaacaaataaaacatggcaatgagcaaatgaccatgggattcattggccctgccatataccacaccatctagaaactgctagtttgaaagaatagcctcttgaaattttagcccaggctctgacttggagatgacacactgtgaagatggggaactaacccttagattgaagtatacatcacacatcttaaaccaattgttcatatgtagtgctgctatgttcccaataggtagcacacgtaagtttgagaatcaagggaagaaggattgtcctcgtttatactcatgaccagtgatgcatttggagaatgtgttgtattttctgtccctgcaacttcaggctctatgatctagaggtcctggggttcagagtgggggatgctgccagcagggaacaaagtaagaattctgctaaaattaaagctaaaattttggaatcttcatgacagtaagccagctggcacagaaattcacactcatgaggaagtaaaccattgctgcacaatagggcctgagaagaatatgtgtgccactgggacatttcttggtatccccatgtccaggttttaactgtaagtagagaagcacctaaaacacacacacacacacacacacacacacacacacacacacacacaaaacctcagttactgagaggcctccaggatgaggagataggttaccctaccaggcaagaacccagatcatccaaaatgctagagaaggggaaagaagcctagaaagagtaatggagggaagagaccgtgagtagcggttactgccttgggaacaactgcagcattagaaactgtagttattctcactaacccttttattctttttcgcagtgttgttgaggctgtaatggggtataggggtcaggggaatgagaggaacttaaatattattcattcccttacgtgtaccaaatactctatagtcaaggtaacactcatattatatgagctaactttttcagctatctctacccttcaaagacaacagatccttttagtgattaaaaaaaagtaaggaaagaaagaaaggaaaagaaaacaggaaggaaggaaggaaggtaggttggttgattgaattttgggttttctttctcttcaaatgcaggaagttttcttttacaaggttcccttccaaaatagtcttaatagtctttctaagaaatgcgtatgcattgcacaaaccaatcagccggcctcctggagttagccagccagttccctgaagtcaggcagctagtttgcactttttaagctgtttcttagtatttcaagcatagatgttcaatcatgctaatgccactctttctatataattgtgtctctaagactcctcatgttgtgggtgaaagaaaacttatctcaaactggcttacataataaaggggatttgttgacttccataacagaaagttcatctatacggagggcttcagcattcatgaactgatagttagaaggtgtcaccaaatacatacttttttctactgccttactctgcgttcatgacattggctttatctaagtctgactcccctccatttccacttccagaccccatggtcatgaaaggcttctaatataaataaggctatgtgtttctccattcttgttaaacaggagaaagaatgtgtctgatccagcattcaaaagtacagtaccaagactcgccctgactggttggcttaagttacatacccaatcttgaaccaatggccatggccaattgataatgtatccttaatggtttaaccaaccaggacccaccacttaagctaaggtaggtttatgtttacccaaaaggtgctggctgtgttgagaaggtgtgaacaaaggtgaatctcagacttgttagaaagtgaaaatgtttggataggaaccaacaatgctcactagaagcagttatttttcaagcatgggtgaggccttcctcttaattcctcatggagttaaagacctgaaaaataacagaacacagaaaatttacaaactagatgctacggtttgaatatgtcccccaaagtttatatgttggaaaaaatgcatcctcagtgcaacagtgtggagaggtggaagctttaagaggtaattagggctcttccctcatgagtggattcatgcctttattgcaggggtgggttagttatcacaggagcaggttcctgataaaaggatgagttcaggccatgtcctctttctgtctctctctctctttctcctctctctctctctatttctctctcacatgctttcttgcccttccatcttctgccatggaatgacacagcaagaaggtgtctccagatgtgggctcctcagccttggacttcctagcctcaataactataagaaatacctttctattatttagaaattgctattctttggtgttctgttatagcagcttaaaacagaccaatacaaataactgacaccaggaagtggggctcttgctgtaacaaatacctagaaatgtggaagtagctttggaactaactgcctaatgggtagaagctgtaagaagttgaaaaactctgtattaccatgcctggagtattaaggaaaattctggtgagtgctcagaagaaaagagagagagagagagagatcccaaatcttcttggaaattacttaagtggtcatgatcaaatattggtagaaatacagatggtaaaggccattctgatgaggcttcagatggaaatgaggaacaagatattggaaactggagtaaaagccagttttattatacacttaaaaataacttggtggaattgtgttcaagtcctaggactttgtgaaagcagaacttaagtgcaatgaactaggatatctgtcataagaaatatccaagcagcaaagcattcaatatacaatatggcttcttttgggcacttacagtaaaaagagataaaacagaaatgatttagagatagaatttataattaaaaggaatacaaaatagaaataattggaaaactctcagtttcgctgtgaaaaaactaaaaaagtgggctcaagagagaatattaagggtgttgctaagtgacgccttactaaagggattaatatggatagaatgaagccaggctctatccataaagactatgaataaataaacataaaggaatttcagagatcttcaaggcaagctaagaccctgagggccaggttatcagagaggtgcccatggacctcagcattcactgtccagggcttgtttgtgactctgctccccacattccagcacagtgctcctctgctgccccagcagttgctcaaacaggcccagatgtggctcctgccacagctctggagggtgaaagcggtaagccttggtgacatccatgtcatcagcatccacatggttctggctttgcagacatgtggagtgaacaagttgtggggccatggcagccccacactaaacttcaaaagtatgtatgggacagcccagtgattcaggcagagacttgttgcaggagcagggccaccacaaagaacctccactaggacaaagcctgggagaaccataggaatggggcagctcctgagaccccagaagtaggaccaacagtatgcaactccagcctgggaaggctgtaagtacgagactccaacctttgagagctgttcaacggactgaacccatcgaagccataagggaaagtctgcttgagaccttgggggtacagctgccaccccagtgtgcccagcacacaaggcatagagtcaaaggagaaaattctccagccttaagacttaacactgttttctctgttgatttttggacttacttgggacaagtcatccctttcttcttgcatgtttctccttttaaaaatagaaatgtcggccaggcgcagtggctcacacctgtaatcccagcactctgggaggccaaggcgggtggatcacgaggtcaggagattgagaccatcctggctaacatggtgaaaccccatctctactaaaaatagaaaaaaattagccaggcgtggtggtgggcacctgtagtcccagctacttgggaggctgaggcaggagaatcacttgaacctgggaggcagagcttgcagtgagccaagatcgcaccactgcactccagcctgggtgacagagcaagattctgtctaaaaaaaaaaaaaaaaaaaagaatagaaatgtctatcttatgcctctctcatcatcatattttgaaggcatgtaacttgctaatcttacaggctcacagctggagaggaatttatctcaggatgcattgtgccttgcgtctcctccatatctgattgagattagattctagactttggacttttgagttggtactgaaacaagttaacattttggagctactaggatggaattaacatattttgcatgtgagaaaagcataaattttggggaccaggggaagaatactatggtttgaatgcatcccacaaagttcatgtgttggaaacttaatccccaatgcaacagtattgagaggtgggacctttaagagatgattaggtcatgaaggctctgccctcatgaatggactatgcctttattgcaggagtgggttcctcataaaataatgagtcaaacaccctcctgttgctgtctctcacatacctgtgctgtttcatcttccatcattggaagatacggaaagaagttccttgctagatgcagacactgggacttcgaacttcacagtctccagaactgtgagaaataagtctgtcttttgtaaattactcagtctgtggtattctgtttcagcagcacaaatcaaagacacaaggtaaaccttaaaaagaatggatcctagatatgactgttgttgaactccataggccaatctctactacacagaaaatcctttgtgccggttccttctaaatgttactgtgcatacatgtctttggacactttgtgaaaatgctgattctttgaataaggcctgagattccacaattctaacaagttcttaagtgattttgatgatgttgatctggcggccacactttgacagcttctctcctgatctcctattcacccccaaagtgctcacctcagagaaaaaggtaaccttgagcttgtctcttcttataggaaactaatttccatttccttaattcctactgaaaaaaatacaaattcttaaaatgaaacacttggcagagttttgtgttcacctccaagcaagacaaacttcatataattttgagaaaagtttaactccatattgctttcaatctttccctcctgaataagaatatttccttaccatgagatatttttaaaagtacttaaagtgtcttttccaaaaacaaagatgcatatttcctcaatgattaatttcaacttcctcagccaggagaaaaaccgaaaatactaccaacaataaaaactgcaaaaaccaaagctttaaaatggcgtttttcacacacattcaataattttaaattacaggatctggtctcaataggaacatatgcagtgtgtatgtgtgtgtaatatatacacacatatgtaactgtataggtatatttgcacatttacacatgcatgcttactagaacaaataatgccaataacttatgacacgcttactcttcctcctctttctatttttttctttttctttttttctttgaggcatttagtggctggtcagggaatctgaataccatttattgtaaaatttctattttagtatgcctttcagttctaagcaactaacttaccaacttttcaaacacaatttgtctgcgtagagaagaccagcacacaggaagaaaacaataacagaggcagcattgcagttctcaggtacacacaggacaaccgaggcatggtaagtgaaatatataaccaactttctcataaaaagtaagtttgtaacaaatatgagagcagaattcggtgatatttgttcatgattattctatttatactgcttatttaatgcagagttttgaatatttgtttctcttgcattgtattagtcaattcttgcatttctataaagaaataactgaaactggctaacatatgaaaaaaagagttctagttgacccgtggttccacaggctgtacaggaaacatgacgctggcatcttctgagcttcttgggaggcctcaggaaacttacaatcctggtggaaggtgaagagggagcagacacagtcacatggtcagagcaagagcaagtgagagagcaaggggggagatgccacacactgttaaacaaccagatcacaagaaaactcactcactattgtaaggacagtacaaaagggatggtgctatatcattcatgagaaatccacccccatgatccagtctcctcccaccaggcccccacctctgacattggggattacaattcgacaggaaatttgggtgggaacacatatccaaactataccatgcactccagataatatttacttagcaacagaaaaaaaaaaaaaaacccttaagcacaaatctgagagagcgtatgcttctaagggagggcttttcattgaatctcgaggctatagaagtgccttttccgatgtggatggcactgctttattcatgaggctctcatactggttctgcctttgtctgtaattaaaggtccaaaagctggctttatatatcactcaaggcaactgtaaaacataagtatatttcccctctgtttaaataactggaataatttgtcccataatcacattggtctctgtgagctcttgaagttttattaaggtataacccacgagtcacagtaatacttggttttgaagcttgattctcatagtactttttaaaaatatgaatcctaactttgtgtaactttaaagaatgaacaggtttgaagacacatcaccatggaaatcagaaggtcttggcatatccctctaatctgagcatggcctacgcagcattggtcatgtgttaggtaaagaggcaaacaggcaggaaaatgccttggctaagaacatacactatggactgtctgggtataaatcctggctttgtcatctactaactagttacaggatcttgcgaaatatgcttaaaatatttggacttcagtttcctcctctgggaaacaaagaaaatgaggtacagtttttagggatgttggtaaacaaaatgtgtgaataaatgcaacacccttagaaaagaaactggcacatagtaagcactcaataaatgtcagaaattgttattgctgcagttcagtggttctcaaatgggagtaattttacccctccagggacataaggcaatgttagaagacatatttaagtgttgagactgagggcaggaaatgctactgataactaatgggcggaggccagcgatgctactaaacatcctacttgctgccgccaccaccacaaccaccaccaccaccaccaacaaaagattatccagcacgaatgtcaacagtgctgtggtgcacaaaccctcctatagaataaaatgtttcttgtgtatcaaatatacatctcagaaataaattacaataaatgggtaaaaattgagacactctctactcttaacctcttttactgtgttctctatacagtaggaagcatatattgcttcctttaagtatagcaaatactgtatacagaaaagtacctatataataagtgtacaactaaagattttcacaaacacacccatacaacatccaaataaaaaggtagaattttaataggactctagttgtagttctgcctaaaagtagccacttttcctgacctgaagcatcacatacgatttttgtgtgtttatgtttatactctataaacattaagtatttttgtgactagtcttattcatattcttgcaagtagttatagtttgttcaattctcatggctgggtagtattccgttgccaaaacacaccagaaattatccatccattctttattctggtgggtttcaactttggactattttgaatagcacagctgtgtgcattccaatacacaactctgagtcaacaaatatatgagtttttattgggtatgtacagcataacctttggaaagtaatggaaaatccagccatgatttcccattacagttcaaacaaaatccaagatcctttaagaggtcatacttcctagtttgcttgagatagtgccaacttgtgtttgtcctgacatttgccatcactctcgaaagtgttccactttagaaaagaaatgatgtgtattgtctactagataccatcttacctaatctgctccatttatttcctgaatctttgctggaagatcttccattgctcacccgaccccagtcacacttctctttccaggttccgaaatttgccatatatttttcatgactcaatccttgtcttatacatctattcttcactcggggcatggttggtacttttccgtcttttagttctgagtttaaatgtcaactccttggaggggcaatgcctagtcaggctatgaatattcttccctcattctcacacttactgtgcctgcacactcttaccttcatagtatttagtacactaagcatttatttatgtatttaagtgtttattatgcttcccctggctcctactagaaagtcaactccattaggctaaaaatgatgtgtttatcacttctgagtagccagtaaatatctgttaaatgtatagataaatgaattagcaaaaatagacaaccaagtaggaaatcagaatcttgcttctaaatcatcatgtttggtcctttaatgcaatttcttcacaaacaattgcaaagacagtaaacaagcgaaacaagatgcttctaggctaaaaaaataaaaaagaatgcataagaaaaggaaaaaaatagtactttatttatttttttattattattatactttaagttttagggtacatgtgcacaatgtgcaggttagttacatatgtatacatgtgccatgctggtgtgctgcacccactaactcgtcatctagcattaggtatatctcccaatgctatccctccccccaccccacaacagtccccacagtgtgatgttccccttcctgtgtccattgtgttctcattcttcaattcccacctatgagtgagactatgtggtgtttggtcttttgttcttgcgatagtttactgagaatgatgatttccaatttcatccatgtccctacaaaggacatgaactcatcattttttatggctgcatagtattccatggtgtatatgtgccacattttcttaatccagtctatcattgttggacatttgggttggttccaagtctttgctattgtgaataatgccgcaataaacatacgtgtgcatgtgtctttatagcagcatgatttatagtcctttgggtatatacccagtaatgggatggctgggtcaaatggtatttctagttctagatccctgaggaatcgccacactgacttccacaatggatgaactagtttacagtcccaccaacagtgtaaaagtgtttctatttctccacatcctctccagcacctgttgtttcctgactttttaatgattgccattgtaactggtgtgagatggtatctcattgtggttttgatttgcatttctctgatggccagtgatggcgagcattttttcatgtgtttttttggctgcataaatgtcttcttttgagaagtgtctgttcatgtccttcgcccactttttgatggggttgtttgtttttttcctgtaaatttgtttgagttcattgtagattctggatattagccctctgtcagatgagtaggttgcaaaaattttctcccattttgtaggttgcctcctcactctgatggcagtttcttttgctgtgcagaagctctttagtttaattagatcccatttgtcaattttggcttttgttgccattgctttcggtgttttagacatgaagtccttgcccatgcctatgtcccgaatggtaatgcctaggttttcttctagggtttttatggttttaggtcgaacgtttaagtctttaatccatcttgaattgatttttgtataaggtgtaaggaagggatccagtttcagctttctacatatggctagctagttttcccagcaccatttattaaatagggaatcctttccccattgcttgtttttctcaggtttgtcaaagatcagatagttgtagatgtgcggtgttatttctgagggctctgttctgttccattgatctatatctctgttttggtaccagtaccatgctgttttggttactgtagccttgtagtacagtttgaagtcaggtagtgtgatgcctccggctttgttcttttggcttaggattgacttggtgacttttttggttccatatgaactttaaagtagtttttttccaattctgtgaagaaaggcattggtagcttgatggggatgggattgaatctgtaaactaccttgggcagtatggccattttcacgatattgattcttcctacccatgagcatggaatgttcttccatttgtttgtatcctcttttatttccttgagaagtggtttgtagttctccttgaagaggtccttcacatcccttgtaagttggattcctaggtattttattctctttgaagcaattgtgaatgggagttcactcatgatttggctctctgtctgttattggtttataagaatgcttgtgatttttgtacattgattttgtatcctgagactttgctgaagttgcttatcagcttaaggagattttgggctgagacaatggggttttctagatatacaatcatgtcgtctgcaaacagggacaatttgacttcctcttttcctaattgaataccctttatttccttctcctgcctaattgccctgaacagaacttccaacactatgttgaataggagtggtgagagagggcatccctgtcttgtgccagttttcaaagggaatgcttccagtttttgcccattcagtatgatattggctgtgggtttgtcatagatagctcttattattttgaaatacgtcccatcaatacctaatttattgagagtttttagcatgaagcattgttgaattttgtcaaaggccttttctgcatctattgagataatcatgtggtttttgtctttggttctgtttatatgctggattacatttattgatttgcatatattgaaccagccttgcatcccagggatgaagcctacttaatcatggtggataagctttttgatgtgctgctggatttggtttgccagtattttattgaggatttttgcatcaatgttcatcaaggatattggtctaaaattctcttttttggttgtgtctctgcccggctttggtatcaggatgatgctggcctcataaaatgagttagggggaattccctctttttctattgattggaatagtttcagaaggaatggtaccagttcctccttgtacctctggtagaattcggctgtgaatccatctggttctggactctttttggttggtaagctattgattattgccacaatttcagatcctgttattggtctattcagagattcaacttcttcctggtttagtcttgggagagtgtatgtgtccaggaatttatccatttcttctggattttctagtttatttgcgtagaggtgtttgtagtattctctgatagtagtttgtatttctgggggatcggtggtgatatcccctttatcattttttattgtgtctatttgattcttctctctttttttctttattagtcttgctagcggtctatcaattttgttgatcctttcaaaaaaccagctcctgcattcattaattttttgaagggtttttttgtgtctctatttccttcagttctgctctgattttagttatttcttgccttctgctagcttttcaatgtgtttgctcttgcttttctagttcttttaattgtgatgttagggtgtcaattttggatctttcctgctttctcttgtgggcatttagtgctataaatttccctctacacactgctttgaatgcgtcccagagattctggtatgttgtgtctttgttctcgttggtttcaaagaacatctttatttctgccttcatttcgttatgtacccagtagtcattcaggagcaggttgttcagtttccatgtagttgagtggttttgagtgagtttcttaatcctgagttctagtttgattgcactgtggtctgagagatagtttgttataatttctgttcttttacatttgctgaggagagctttacttccaagtatgggtcaattttggaataggtgtggtgtggtgctgaaaaaaatgtatattctgttgatttgaggtggagagttctgtaaatgtctattaggtccgcttggtgcagagctgagttcaattcctgggtatccttgttgactttctgtctcgttgatctgtctaatgttgacagtggggtgttaaaatctcccattattaatgcgtgggagtctaagtctctttgtaggtcactcaggacttgctttatgaatctgagtgctcctgtattgggtgcatatatatttaggatagttagctcttcttgttgaactgatccctttaccattatgtatggccttctttgtctcttttgatctttgttggtttaaagtctgttttatcagagacgaggattgcaacccctgcctttttttgttttccatttgcttggtagatcttcctccatccttttattttgagcctatgtgtgtctctgcatgtgagatgggtttcctgaatacagcacactgatgggtcttgactctttatccaatttgccagtctgtgtcttttaattggagcatttagtccatttacatttaaagttaatattgttatgtgtgaattggatcctgtcattatgatgttagctggttattttgcttgttagttgatgcagtttcttcctagtctcgatggtctttacattttggcatgattttgcagcggctggtaccggttgttcctttccatgtttagcgcttccttcaggagctcttttagggcaggcctggtggtgacaaaatttcccagcatttgcttgtctgtaaagtattttatttctccttcacttatgaagcttagtttggctggatgtgaaattctgggttgaaaattcttttctttaagaatgttgaatattggcccccactctcctctggcttgtagagtttctgccgagagatccactgttagtctgatgggcttccctttgagggtaacctgacctttctctctggctgcccttaacattttttccttcatttcaactttggtgaatctgacaattatgtgtcttggagttgctcttctcaaggagtatctttgtggcgttctctgtatttcctgaatctgaatgttggcctgccttgctagattggggaagttctcctggataatatcctgcagagtgttttccaacttggttccattctccacatcactttcaggtacaccaatcagacgtagatttggtcttttcacatagtcccatatttcttggaggctttgctcgtttctttttattcttttttctctaaacttcccttctcacttcatttcatttatttcatcttccatcgctgataccctttcttccagttgatcacatcggctcctgaggcttctgcattcttcacatagttctcgagccttggttttcagctccatcagctcctttaagcacttctctgtattggttattctagttatacattcttctaaatttttttcaaagttttcaacttctttgcctttggtttgaatgtcctcccgtagctcggagtaatttgattgtctgaagccttcttctctcagcttgtcaaagtcattctccatccagctttgttccgttgctggtgaggaactgcgttcctttggaggaggagaggcactctgttttttagagtttccagtttttctgctctgttttttttccccatctttgtggttttatctacttttggtctttgatgatggtgatgtacagatgtgtttttggtgtggatgtcctttctgcttgttagttttccttctaacagacaggaccctcagctgcaggtctgttggagtacctggccgtgtgaggtgtcagtctgcccctgctggggggtgcctcccagttaggctgctcaggggtcaggggtcagggacccacttgaggaggcagtctgcccgttctcagatctccagctgtgtgctgggagaaccactgctctcttcaaagctgtcagacagggacatttaagtctgcagaggttactgctgtctttttgtttgtctgtgccctgcccccagaggtggagcctacagaggcaggcaggcctccttgagctgtggtgggctccacccagttcgagcttcccagctgtgctagcaatcagcgagactccgtgggcataggaccccccgagccaggtgcaggatataatctcctggtgcgccattttttaagcccgtcagaaaagtgcagtattcgggtgggagtgacccgattttgcaggtgccatctatcacccctttctctgactaggaaagggaactccctgaccccttgcgcttcctgagtgaggcaatgcctcaccctgcttcggctcacgcacggtgcgtgcacccactgacctgcgccctagtcagtgactgtctggcactccctagtgagatgaacccggtacctcagatggaaatgcagaaatcacccgtcttctgcatcgctcacgctagttgctgtagaccggagctattcctattcggccatcttgtctcctctccccaaaaatagtactttaaaagaagaattatgtaacccagctataactaggacatccaagtccagtcttagtagattctcacattcattcaatacccacagtgttaaaaattaattaaatgtcttgagtttattgaggtctctagaagacataccaactataaattgtgttctatgacaaatggaagtgcttgctaaataacagtagataacacttgctgggcagtaattctgaacataatcagcattttaatgtatccctctccctgaagggcctccagattacctcctgctttccacgagaatctcatttttctctgcttttttccctgctttcatgagacctcactgtttctttcttatcttcataacctaatgatgtagtctattcaatttttctaataagatgtcttatcattctctcatgtttaaatttttttaaaacctgtaatcttgatgagaaatgtcaagtgacagaagactctagcagctcaatgaggctgtgttggaatgaagaaagaagaaaaagatgtttttgtttatttggttgcttggttgttttttgtattttttaaagtaagaactaccatcttttctattactttttccttgttaactcacacccttcatgtgtagggggaggccatactagcaagaagagagaaaactgtcgtacaaatgagaagatgtagaaggaaggattgatagggggtgatagggtcatatttatttttttgttgttgttgttcaatggaacaataagcatttggagtctttcacagatgatgaaagagacttgagaaacaataaacggattaaaatccaaaaaaaagataatattttattcagggaaaatggaaagaataagaatgctcaccttggtatttatgttttttgggaaagcagcaatgatgagtctctcaacagagtgacaaaaatgaggagaagtcctctttcaatgcagaaattgtgctataggaaagagcaagcaggggtagagggatgaatcccctttaggactcacttcttccaaatattcagatcttctttcctttagggaaggttacctatgggaaggatggtaacactacttctttttcccaattcattgacaatttttaagatttttttccaggtcttttcttctatcgctgttatataaacaactatttccatttttctttggtgtatttatattagttattcatttgattttaaaaagtgccttctctgagactcttctgatggtattgtgagcacagccaactcaggtgagggatttctgctcatgggtggtgacttcagggtcctatctacctcccgacatttgagtcattgtcagatctctggaaagtcacccttagaactgtgcacacatcaccctagtaggaaggagaaatggaaggccaactcttggaattctgaccatatcttagttgtaaaaactactttttgacccaccaaaatttagaacctatttctaaggaaagagatcacatgattactgtattttaaagagggaagggaaaatggaacaaatgtctattagatatctacaatagtatcaatattaaataaacccattacatcacttgcctcatgccatccttacaactttttgaagggaaacacatgggattatagacagtaaaacagactcctaagattgtggaggctggtgccagacagcgacatacaaatcacactctgccgcttactatctgcagaacattaggccagtcacagaacttcactgtacctcagtttctatgtctggaaagtggagataatgtatttggtacctacctcatcaagctctgtgggaatagtaatacaagttaattaaaaataacatgctttgtggaatagatgttgcctggtatattattccatttccacactgctgagaaagacatacctgagactgggtaatttataaagaaaaagagctttaatggactcacagttccatgtggctggggaggcctcacaatcatggtgggaggtgaaaggcacttcttacatggtggcagcaagagagaatgagaaccaagaaaaggggtttccccttataaaaccattaggtctcttgagacttactaccatgaaaacagaacgggagaaatcacccccatgattcaattatctcccaccaggtcgctcccataacatgtgggaattatgggagctacaattcaagatgagatttgggttaggacacggcgaaaccatatcacctggtatgattactgccatctaattcaccaagttcacttagttactaaaaggcaaaggagacactcaaccttggtattcactgatttctaacaccttgctaccctctgctagtaacggccacattctggaagggggcatacctgtgctttctactataggttccagagaaatgtaagactgtcttgagtcacctaaaagtactcattgactgaggttgaacatggacttaaaagaaagtaactcagaaaggtagagggagtaagcatccgattcaaaaccaaaacctgttgtttcttcccgcaaaaaagaaaatgccaaatgggatcactccttgctgactcatctactgatccctagacccagccatgattagcctcttctagactgaagccgaagtcctaccattgttcttcctgcttccacccaccccagtcaacttccctgcttagatttaaattcatgtaatttggatcttatccctgcattgctcaaagcccttagatggctccttccatttctttctcaatctggcccaaagtcatttgcagggctcaccaggtctacacgtgccaccctctgattttatctcctcaggctctcccaacttttaatctgctccagccacagaggaccctctgatgctccataaacctaccaaccacactcctcagtgggctttgatgctctattccttctgcttagaataatcctgcaagatatccacctggcttgatgtcctttactttgagcacgtttctactcaaatgtcacctcaaaaagttcttccctgatgatgctacctaaaatagcatttcctaccctgtagtccttacctctgtttatttttccttacagcgcttaccaactgaaaaaattgtatattgacttatttttttattggtccatctccaccactagaataaaaactctatgagaacagacacttttttattctccactgattggcaggtatgacttaagggaataaaaattgacgaatctcaacagcattagtaatcatctcctggtaaactcatgtgcacctatattgcctatggagctctgcggcaggtgctttatatgaattatctcatttaattctgctattacattactgctactattagacctattttacatataaagaaactgagagaaagaggcgaaagcggaccgatcgctttgctccagtaatgtgctggctggggattccgttgaatcgctgcttgattccagaacctaagctcttagttatattacactttatgaaggaccaatgataaattccagttaattccattgttttttccgtaggaccaattataaatgtcagcaatgaaaaaagagtggttataaaagggtatttgacctccattttctctgttacttcagagttaaattgctagttgccaaaaggcaggtagtagcttgaactttcctgccatgctaattatgaaaatgaagagaatttgaatggagcagagaggacagagttcagaattctcagcataagagacactcactttcagaaagagccttgaatttatctccattttaatgtctttccacattttaaaatattagttgaaagggggatttgagagggcagcatcgccaaaataaacattcaacacactgttatactagaattttattatactcgggttcacaggcgcccctgctgctgctgctgcctgtccggagactggtgaatcagtggttgtgtctgaaaaggagacaaataggatggaaaaaatatccattttcctgtctatgtgtgtactttaaaaggcagtaaggttgcatcatgtacttatgggaacaaagtggtaaaaaaaaaatctggttgaagtattgaattaacttcatgtcttttaacaccaccaaaacacacttttctattcatttttatgcagcagacatttatatttttatattgtcatggagaccaaatgggactcaaatgattctgcacattattatggaataatttgtctcctgtgaagtcatttttttagtgatatatgctgcggatagaaaagattaaagaaaccagctagagagggtatatttatgcaatgcaacaagcacatacacaaagaaggatgatgtaataatgtaagtaatttagaggttttggcaagtacgtgggtggtaagccatgactgcagtcgactctcaaaagttgtgctacatgctcctggggaaagatcttattaatgttttttcaagaaacactggggttaagataggattcactcaaggttaatcattactaatcttctggccctgaaagaaataaagatatgtactcaccctcttaatttccccatctgtaaatctggatacatatacaaaatataaattttcttctctaaagataaaaacgataaagtgagcacccacctgcatccctccactccctgaaagaccttcaccccctagaacatctctttaggggtgtcaaaattcatctgtttggacctcccagtttttgtctgagagaagaaagaccatttcagttgttgggagtaagaagcaaattgcatgatcctcacggagtccatctgggggatgtgttctaatacaaacttggacaaaagtgctaaaatgctttcttttgtaattatatcttttaaaaagtaaatattttaaaaataattttagatttgtaaaaataattgaaaatatagtacagagttatcttgtgtaccccttgcacaatttcctctacagttatcatcttacattatcctgataattgtccaaactaaaaaatccaacactgatattactattgattaaaaagctgtccttacttgaattttaccagttttccatatacgtcctcattctgtcccaggatccagtccagggtacctcattccatttaacaattgtttctttaattctttaaatgggagtagggatgggcatgcgttcaagtgtaaagttaactagacggacaaaccaggacctagaccttagacctggtcctcaggtccttgagcttgggaccctgagctaattaaccttgctgggcttctgtattagtctgttttcatgctgctaataaagacatacccaagcctggataatttataaagaaagagatgtttaatggattcacagttccacatagctggggaggcctcacaatcatagcggaaggtgaaaggcatgtcttacatggtggcaggcaagagaaaatgagagccaagtgaaaggggaaaccccttaaaaaaccatcagatttcatgagacttattcactatcatgagaatagcacaggaaaaacccaccctcgtgattcaattatatcccatcaggtccctcccgcaatatgtgtggattactacagttcaaggggagatttgggtggagacacaaagccagaccctatcagcttccaaacccctacatgctctgcaaaatgaggaccaagtgagccatgtatcagcctgagaagaacactgatatggcatggccttttcttggcacagtttgtaccactcagacaatgaagaaggaaagtaatgaaggaaagtaagccctcctcacttgttcccatttgcatttgccaagcttgagttgaccatgccatgcaggaaatcaaaaaagtagggaaactcccaactgaccatgctctaggaaaagaatgatcctgcttggggaaaacaaggatggctaatcatttacaagtttctatctctgaaagaatttgcctttcacctgagattcaagtggccttgaggcagagaagaaaggaaaaggaaactggccaatcaaaccttttagcaaccgtgtctctccctttatcatcatccacccgccctcttccctactcactgccttgtccagtgagctatccactgtgttcctgcctgctacagcctttgcagtgtctccctccctcagcaggacaccagtccttgcaagcttgcaaaggccaaacaaaaccgggactcacaaatatgtaactgttttccttagcttgtggcataaatcaaaaaaaaagaaaggaaaaaaattctgttagcacagggctctggagtgtttatttttttgccagctgcaacatgctaccctcacaggggatcacctaaaaccagttatggtttaggttggagggggatgtcaaacttaagctgcgggcttggcctctctcaatgaattacgaccttgtcaagaacctatttttttaaatcaatgcaggttttctatcaaatcaaatacctgcacactaaattatatttttggtgccaggctggctctccaattttttttccctttgctagttttttccagcctcctcccttaaccctcctccctctccttactgtgatacagacggtttttgtccataagaagaaattgaaaatcaagtcctacacttggaaggggagatggggaactgtcttttgtcatcccttgtacatgcactaccaatgtttaccatctgtctcaggggcttaagtgacagaagggctcctatagatggagtcaaggcagtctcttgggatctttaacccagtagcatagaacacatttgctttcagaagaaagacatctttttatttctttttaaaaatttctgatgggtttgagggtgggatgataaatgagggagccttctaatacaggtgctcagataaaaagttaaacatttagataattcttcaaatgtactgttcagacatttctccccattatgtgacttgataatgtaaatagatttcagagaatcaaggaattatttccttccttccttcctttcttccatcctcccatctttccttcctctcttctttgctttcttctttccctttttcaatgatttcctttaaacaagggaggaaactcttctacctcagctcctgctcttcctggcagataagagataaaattttagagtgagttttgtctcctaaattggtaagttaatggagaaaatattagagccagaaatccctgcccttagcccccctgatggagccagcagaggctggaggtgcctactgtgggaatgtggcaagaatgattttttaataataggaatctccatgaatcaaaattcacttagggtaaaaccatgaaggcatatagctcagagttggcacccacatggcccctttacatggcccaaaagcctttatttggtggtttttcaattaaatgccacatatacttcaggccatatgtaaaggatcctcaaatgaattgcaaactgttttcaatagcaatgatgatgaataaaacaccaatgagcaaatcctaatcagtggcgtctgagtctccagaaaccaaatcaaatattttctggttggactcatgacatttttgataggctgtcatagtgccaatgtcatctttactgcacaatgaatagctagtttggcaggaattctgctcctcttatttcttcccactttattcagctgaataccaccactcctagtgtggtctttcctgatgaaggcatgcttagaagttcctttgatcaggcagtctttattgtgagtttagttccttacatgagaagtacaagatggaaaaatgtgcctagaatgatcctggatgggaaaacaggaaaatattcatttacgctccaaagtaaaaaaggtaagacacatagctgcgttatgtgcactaatggaagcctaagtgtaccagagcctgtgcacttccatcatctctttcttttcttttcttttcttttcttttcttttttttttttttttttgagacagagtctcgctctgtcaccaggctggagtgccgtggcaagacctcagctcactgcaacctctgcctcccaggttcacgccattctcctgcctcagcctcccgagtagctaggattacaggcacatgccaccacacccagctaatttttgtatttttagtagagatgaggtttcaccatgttggccaggatggtcttaaactcccgacctcttgctcctcccgcctcggcctcccaaagtgctgggattataggcgtgagccacgacgcccggcctccatcatctctttctaatggttgtaattcaattggacaaatatttcactgaattcttactatgttacagttctcaatgccaggtgtcataggatccaaatatgaacaggacatggtttataaacagagaaagcttatgagaaacatcaacaatcagagataattcagatagacctgggcaaatgataagagtggtcaggttgtttttgaggctcagcatccatttgtttcaccctagtgtttcttgggaaaattatcctcattaccccttgagccctcaaaccatctggtttagatgaaattgatcttggtttcagcttcaaggatgggccgtgattgctctgagctaattaatgaatctcattctcctgacttcaatgactagggttaagacctaattctcatcagtaagaacacagcatgcacttaaactagagttcagattcaagaggaaaaggcctagagtttgcatcatgtaaagtcaaagatcaacaatccccccagagaagtaaacagtaaggagccaggctcactgcatgaaatttgggaccactcaaggctcccctggccctgaaaaaaaggcagaaagagcagttgctactaccagggttgaagagcctttagaattctatgactaaaaaaagtggaaagaaactgtccccgaggctgggtacagttgctcatgtctataatcccagcattttgggaggcagaggcaggtggatcatttgaggtcaggaattcaagaccagcctgaccaacatggtgaaacccccatctctactaaaaatacaaaaattagctgggtgtgctggtgggcacttgtaatctcaactactcaggaggctgaggcaggagaatcacttgaacgcaggaggcggaggtttcagtgagccaagattgtgccattgaactccagcctgggtgacagagcaagactccctctcaaaataaaaaaaaaaaaaagaaactgtccctgaaaagtagatgcttagccagtaagacacacttcccaattcttcttgaatcctagtggggccaggagaccagttcttgccaatgcaacgtcaaccaaagtggtgtgtctcccttgcaatacagggtgattaggatcttgctgtgcttctcatccctttgtttcccatcttccatcagaagattctgagaccctgagagatggcaaacatttccaagatgaaaggattgtgaggtcctgaattcctgtatggaaggctgtcttctgatgagacacacttacattagactgttgctgaaaggagagctgaatttgtgttgcattaagccactgaaatactgtagtttatcagtcaaatcgttaaacttagcctaattgataaactggtggaagatgacaatagaagtcccagcactaatctaggaatcttgaaatacaggcagaaagaacagtacaaccaatagggcagaaaatgtaaaaacaagagagaaagaaaaaatgttcattcaagatgagctgatatacaatattccaaaacgtgagcaaaacaaatactcagtagaacgaacaacaaaaaacactctggggcgaattaattctattcaaagtaaacctatctatgagttgattaatagaaaagagagcaacccgaaaatgactgtgaggtctgtagttaatgtggctattttgtatcaaaagagggagtgtattagtctgtttctacactgctaataaagaaatacctaagactgggtaatttataaagaaaaccaggtttaatgggatcacagctccacgtggctggggaggcctcacaatcatggctgaaggtgaatgaggagcaaagtcatgtcttacatggcagtaggcaagaaagaagtgcagggaaacaccccttcataaaaccatcaaatctcataagacttattcactatcatgagaacaacacaggaaaacctgccccattgtgggggcaacaaagcttagagcctgggacaggatcctgtactcaattgtgcctgcagccagtcccaattttggactgttcaatttcactgacaaatacggttaacccaatccatgttagatgttctgttagttaaaacataagtgttctttctatttttatttttattttttcgccagggttgtcttctgggcatctgacctgtgcagccaggtaggaccacatgctcatacttcgtttaatgctccgatgccaccatcttgaaattcttaatagtttttgaacaagggccctgcatttttcattttgcactgggccccacaaaagatgtaacaatatctgattaatgtatttaataaaagtataagcgctatgaaaatataaaagagagaaaggcgatacttaaaacatatttggaggtgaagtaaggatttggacacgtagaaaagagggcataaaaaatgttctagatgaaagaaaataattttttaaagtatgcaaaatggtgttgaaaaagtgatccatctgcttgttgccagaccattacctgcaaggtttgtgttagtgttagaagagaaagtgagactagaagatcaggctggctctggattgtggggtgctgaatggcctaatgagtattttggaatttattctttagaatactgagaaacagctaacaatttttacttctgcatgctatttaaaaatctatgctatttatatttatatattgatttaaatacaatatttaaatgtaaatatttacatagtcatgcatatataaatattttatatattttagaaaaagattttgggcagaagaatgacccattccaaaataagcataattgtcccgaggtagaggacattaaggactgtaatgcaggatgacaagaagaagacaggtttgaaagaaatttaaagagtagatattgcctggaaaggtcttagctcagatcaaagcaaatggtaagagatccatgaatattagctaggatatttttttttcctcaaaatcaacaggacatcttggaaaggacagagtggaaaaattagaagtaagtcttagggatgttgtttgttgttttcagggtttttttttttttttttcagattaattcaattatgttctacccacacatctaagatagagaaaacacaagtgtacatgcatcccataaatacagaaaattctttaataaaggaagatactgtactcaggaagtcttctcccattagatgggatgctgaagactggacattgcattccctcatttatggcttttcctgaaatcatcctcacactggttctaagatgaacttgctcactaagagctccttgaactaaattacctttataatctcttctaggctttggatttgggaatctggtatgggagaggcagaatctctctttggaaattaactctgagagaagacagtaccccaggacacttccttttattctgcgggattttaaattcctataaattaggggacaccagaagacatcacttgccttaactgaaagagtaactggagactgttcataattatctaaattttgtttccacttgggagttggtgcttttgaatcaccatgaatataagcatcacacagtcatatgttatttttattctgggacttctattggaaaggaatttaaaaaaaatgaattgctaactttggccgcttggcaccaaaagcaaggcagtgaagataaacttaattttattataatcattattaaataaagatttgggaaaacagcaagggtatatttgtgatagaaattattaaaaatgtatgtaaataaccatgtagattttctacatcccttaggctccaacgaatattccaaatcactactgcctctttggaaacttgatttctttttttctttatttgagtagttatcagtcctgaggttcccattacattaggcccatattgaaaaagtatttctgagatgagaagctggctttaaaaatcaaaacattttcttgtaaaaagaggacctattgtttcaaaaactagacatttaaattccaaggttatggatatgtaatatgtaatatttttcctccattttgtaacctaacattctcctactgtctctggtagccaagattttttgtttgctgttcaccaaggagattgttgaggtagtgcagtggaaagaacacaaggcctaatgtcaattttgtttcagtcaaatccttatgctcttccattctgcatgtggtggtaagcaaatggcatcactactctgagcctcgatgaccgtctgtaaaagaaggattgttaatatacattacacctatctcaaaaggttgttgtaaatatcaaatgagaaaatgcacaagaaaataaattgtaaactacaaacttgtagcatgtgcaataattaatacatactacagcattaagcaatggcctgacacttggctcaagggcagaaacacaagaaatcaagactaaacttcattttagagggggaaatcggtaaatagtatagtgtgataatgcctaggacctaggaaaggaaaggttttttaaaagcaccaaaggaagatatcaaaagcatagtaggaggtaagggaagacagaggtggtgttattagcgctgaaatccaaagcttccttcaccaccatattacctcctaagaaattaaattccaggtaatcagcaatgggtaactccattgcctgattttcttggcacaaaagctaacaagcttcattagttacctggacagattatctacaccagccaaatccacagcccccacacctctcccggttcagattcagccgtctattctgtgctatggggtagatttcttaagtgcaaggaaatttccagagtgcaatttgaagtccaagtgagtaaaaaatgtaatatttttcctcccttttgtaaaagcatgctgatatgttcttaattctcttgccattttgtattagagccctgatacttagtgtccagaagttatttgacttaaagacgtttgtggcttcaggttactttccacattcagactccaaagttgctggctgctacatacatactctccagttggactggcctccagaatgagcgatgactccgaaagataacatatttatattaagacaaggtgataggaaaataaggtacaacaagttagtccatacaaatgcagctattgagatatattgtatttttggtacaaattactcagtggcttgttacatagttgggtttatttgcagtaatatagaatcatcagatcattgctattccttcactccatctgctatgtgagctagcttataaaaaactctaaaggaaaaaagaaagaaagaaaaaaactctctccccacccaagttgctggggttgttggtttattttacctgttactaatatcaactttatggtacatttttgtctgctttaaaaaaagtggtttatatgaatctatgcagtatattatttatagtgttgcggccagatcttttcatgataaaaatgtaaaaccttcctgtaaaaattttttattttaaataaaaattacccttttcttccccagtttaggtcagctcttattttgctccataaccaccaaaccttgaaaacttacattgtcgctaatcaatggaccagactttaacacgcgttttaaggtcatgctttaaattcatttttgtgattgcaaagtgacttttttccctgtctggcaattaactgatacgacactaatcctttgcacatctggtactaaatgtttgctcacatgggttcccccgtgagaaagtgtggccaaacggcgacattgagtgtgcttgacttcactttaaaatcttcactctccgggattaaaatcttgagataaaacatctggatttcaagggtgtccccagagaatgaaagttatagttgtatagaatacatattgcacataatatggtcttgttatttctgtattagcacaactccagccggtgcctgccgttagcatgtcagtctcctgacacatcattaataaacaggtaatttcataactgatttccagcaagtgtcatgttgaaaaccacctgggttttagttttcactaacattaaaggcacaggctagagggaggtcgttattattaaactgggactaatttaattgaataatgaatggaatcagcaaaaacaaatgcatatgcagaaggataaaagaagtttccaggccaatggataggtctggatccactgataaagatgtgactattccttcccttccccttgccctctccaaatttatacattaggagttactctgaaactgtgcccactgcctccaggaaagttccaaaaaaaacaccaaggaagtaaccatgatgggggaaaaaatctatacttttaaaattgtgacatgtgaaattaggtctatgatatgcttatgtattcaatgaattttaaaggcatattgcacgttgaatgccattaaagatgaaaaacacactcaccaaggtaagccattgtcacagttaacctgtagatctagccaagtgtgtactgagggacaataacctgattgttaaacgtaattgaaaaccataactgtgatataatccacatcttggcctatgctgggccttcttatttttattttgtaaatctcgatgttatcttatcggcatcatttctactacattggaaagtagctaagcaatgctatggcctgacttcacagcattagaaatgttgcccagtcgtttccagggggctctcagtcttttgatgtatttcagggggagtttttaactttctttatgacccaaagctaataactttctatgttagcctttgtcctctgctcatgtgaaatttcaatcacaatatgaacctgaatgaatatggagtattattttggcattttctacatcctgccctttgtctttagcaaacagggtaaacaagttgtgttttaccaacttctctgaccgtctattccattctcaactccataataatctttccttcttcccaacaagtttttaggagattcatttacaaaaaatctggcctgtagtttagacaaaaacctgattagagactgggagatgtagaaaactgatgccaaaatttctttagttttttttttttttatttcataacaaaagattgtaagaaattattcagtttacatgaagacattgactaccactggttattcaatacactatcatgcatatagtgagaaatttaaacacatctgttataatcactcctattttatagtttaaaaaagcagaagagcaataacgatagttgtctaaagtcaataattgcctaaagtctgtcacagaggttatggtgaagccaagattagagcttgaatgcttccaaaaaaagcaatgttatactagatgaaacagcctgaactaaactagtatatttctacatgtacatcgacacagtaagcttcctaaaggtgcagtcgttactgtaaagctggtagaatgaaataagcaagtatttcctaagagtttgtataaaaatgaatcgcctctggccaggcgaggtggctcaagcctgtaattccagcactttgggaggccgaggcgggcggatcatgaggtaaagagatcgagaccattctggccaacatggcgaaaccctgtctctactaaaagtataaaacttagctgggcatggtggtacttgcctgtagtcccagctactcgggaggctgaggcaggagaattgcttgaacccgggaggtggaggttgcagtggtgggagatcgcgccactgcactccagcctggcaacagagtgagactccatctcacaaaaataaataaataaataaataaataaataaataaataaataaataaataaatcacctctttgtttttaaagcactttccacgtgaatgaaattcttgaaattttcaacaagcttatgccattggtttgattattagccttgatttacacacacggaaaccaagtcaatgagggtttaagtaaaatgtgccaggatgccaccactggtaagtgattagaagaagaatttggaaccaagaatttgactccaaagcctaaactcttaactgtgatgtacttcaccacctttctaatgacttataattgctagttgttggaatgttaccaagggcaaaggataactgttaataggaatctcctagaacttgacaatgtaaggactagtttcccttactttagaagccaatcccataatgcaaataagaggtgcaagttcttttttcctttttcttttcttttttttttttgagacaagagtctcactctgtcgcccagggtggagtgcagtggcgcaatcttggctcactgcaacctacacctctggggttcaagtgattctcctgtctcagcttcctaagtagctgggattacaggtgcatgccacccactcctggctaatttttcatttttttttagtagagacagggttccatcatgttggccaggctggtctcaaactcctgacctcaggtgactggcctgtctcagcctcccaaagtgctgggattacaggtatgagccactgtgtctggcccacaagttctttatcatcaattttttttttcttagatctaagagacattttcctaggcattctaagtctcagctgtccaatctgtaaaatgggtatagatggaattgccttacaaatacattggtgtaaacacaaatatattggttttcaaattcatgctttccagttattctgtgtttggtatctttatgtcactgctaagttagatcatcgttctttctacttggggaggaggggtgcctttaccatgacaatcttctatttctatgatagggaccccaaattaatattgtatccattagtactttctactagcttctagtagtagctagaagtactagctagtacttgctagtagtactagtagtgctggtagtgctagtagtactagtagtgctggtagtactactagtagctagtagaagacactagttagttatacttctagtagctactagtagctgaaatttttgtacgctgaaatgtgaacaccctcatacatattgattctttttcattcattgacatcaagcaatttgtaccacatagaaaagtgtgttaaaatcttttaggtgaaacacgtatactatatgaaaaaaagatattaagtagtcaaaattaacacaggtttatgtatccaagcagaaatctgacaactgaggattaaagaagaaaaaaatcccggaatgggcctagggcaaatctaactatctctgttatttagatttttacttccccagccaaatcatgcttataatctatttaaattgcatttttctgcacagtttttcatagtcttgtgaaggacttttgtttacactcaaaataatacaagccattcaatggtaaactgatgaaggaaactaacattctggacatttataaaatctatgaaaatctgtatcaaactcagttaagctcttccctagactaatagttctcaatcaggggtgattttgcacctggattggggttctccagaaagacagaacccacaggatatacgtagatatacaggaggagattatgggaattagttcacatgatgatgaaaacgaagaagtctcacaatatactgtctgcaaactggaaaaccaagaaagctgctggcataattcattctgagtcaaaggcctcagaactagaggagctgatgatataacccctagttataggagtttctgagatgtaaaacacactttctgaagcatctgaaacctcaactaaaggcccaaaaaccagggatgaatgtgggagctgctgatgtcagtcttggagtctgcaagacctgtcttcttgttctactcaagtggaccttcaacagattgaaggatgcctgcccacactggtgaaggcaaatctctacctgttctgccagttcaaatgctaatctctcctggaaacactctcctagccacatccagaataatgttttgccagcaatctgggcatcccttagcccaatcaagttgacacataaaattaaccatcacagcatgtcagaatagggaacacttggtgatgtctagatacatttttggttgtcacaactgggtgggtgggtggtgctgctaatatctagtgggtaaaggtcagagatgctgctaaacattctgcagggtactggacagcccccaccgcaaagaagtatctgggccaaaatgtcagttgtgctgagatagagaaaccttggtgtagactatttgttagagccattgataaggcaaccagctagtgagagcctaacaaccagaaaggtttctatagggcatgtatatttcatctcagcctcacattgttccattcccaaagcaaaatgttatgctcttcaaaatctccagggaagctagaagcataaagctttgggtgaaatgtaaatttcttaaaatatttattcatccataagtggctacatttttgacattattatatggtttctcagtgttccattttattaaaaaatatttatttggtttctaagattactgcttttctgaccacagaaaattcaattactgaaaactgcagctatcaaattggttgaaaataaatagccttttatccaaagctggcaaagactggttcacttttaatatgtagccattaaaaaaaaataaaaataagaaaacatttccattgcaagctgatggactgcagagtctcaagccaagcagtattttgcatcatcaggttttatttaaaataggatgagaaaggagtgggggcagttcaagaaaagaagtcatcatcagagtaatttaacattatttttcctcttttgttttacaagacagaaaaaaaaagtgagcctttttgccaatagaaatcactttctcctgctttctctctgtctcggtttgaaatgtttagtaatatacaggaaatgtggtaagtgggatctacaaacgtgggctcccaacatcaaggctaattatgtgcgaagcaattgagatggcagcagaattgccagggaactgaaagggaggctgaaccagcacgcctgggtctttcattggcttcatatttgtgttttaatctcctgcacaacacgttttttcccctttctacaaagaacacatgtccatgtttcctcagtgaaaaccaataaacaaacaaaaagaagtaacggaaaaattagtagaaccactttgtaaattaaagagccgagattctccagcctgtgggttaaatttccatttctgagttgccatcctcctaccactgaagacgcatctaggctgtttctcacttcagtaagattgatctacacacaattcaagttcgtttttatattaggcttataaaacatcaggaagccaatactgctgcagaatatagataatgcttattatgttaactagcctgggcatcactcatccccttgaagacaatttgctgagaattattgaggttgtacattagaagaagcccttaaccgatgagaatcaagagatctagctttgcttgctttctgctattaatcagctgggtggacttcagcaagtccttaaaactcactgagacacaattcctttacccgtacaatgaagtggttggaagaaagtgtctaaggtcatttccaactctataattttttgcctttgattttgttcacccagtacggtatgaactctgagctaatgacacaccaccattagcaagaagcctccctgcatcaaatgtgaaattctaagatctcgcaaaggctatttccaattatggtgataatgtaacactcttctttgccactttattttcccaagatctgctctcctaaaatgagattataagagatgatgggtgatgctaatcacagtcttggaaactgaaattgtcatgagaaatgtgtgcttaaatgggaccatcctgtgcattggctgacgggaaaagactgtctttttctctctctctctctctcacacgcacacattccccaccctgaaatgacttgtcttttaggagagtgcgaggggattggcaaagaggatttaaccacagctaagggtacggtgttcgtgacaaagcacacgatacctagagagaacaggacaaccactgcatagtagtcagaactagggctgagcagggaaaggctgacttcatgaggagttcccttaaaaagcagaaagaaaacataacagctctgtctgctttctcatgtctctgggttaggagagaaccacaggctcccagtttttactgcctggttttgcggtcttattgaggggtaacgtgacgacagacaataacagttctgggccctcccattttggaaattctttactagttttcttaatgctacttactatgtattatagttgtgggttctagataaaagatactacttcttacagctaatccctcttgtttgaaccttcactagtttgtaagagattataccaggaaaaccatatcaggattttttttttaataagtcaaaaagatgaccagggaacatagcacattttgggaattcagtgtggggaaggagactgatgctttcatgtaacttctaaattttaaaatcatgagtttgaaacatatctgcatcaaggtagaacaattccactgtcattggctctattagagcccagtgactttagaggaggggctgatatcatcctgtcaaagggcaaagggcatcaaaggatggaatttaaaacatctttgaagagcacagggtcagcagatctttgttaacagcttctgttcgcagacctgccaaagtgtaccctgtgcttctggtggggcaactgtggctgatgattgacagctctgtgataaggaaagctgacagtagagtctcccatcagggcggggtgcaaagaggtggagaggagtgtgatgctcttccaagtctttttagcactaaacatgtaagtagttgcaactcccagagagtgatctacgcaactcccagagagtgatctatgcaaagttttaaaaacaacatctgatttagttaaacatgttatataatttgacatgcatagaaaaactccaaagcaattggcagattaggaaagcaagcgggggaaggtcaagtgttttgtcaaaggtagaagcacagttaatggaagaaaagactctaaacccaggtcttcatccactagaaagcaaaattatgaaaataattgtccaaaatgacaggtggacaggaataactgatgaatggatgaaatgtgaaattaaatcaaaattgcactacttagacaaaagaacagattttggacccatcttgtgattctttgtttgctccatggatgtacacccccagatcaaactagaaacttcaggctgaggagaggaaaatgtgtaagtagagaactgggaaggatgacatgaattaaaatcatcttaaaagagaagtaaattcttctctgtgctttgcctaagtgaacatagtctttgtgttaacaatggaaaggaaatacctttccattttaagaatggattaggctagttttatgtcattaattgcacttaaaagaatttagccaagtttaacaaatttattggtcatctactatgagccaagagtgaagtatgaaggaaactggaatccaaagataaatgagaccagtcctcagagaaggtctcatgttatatgaatgccaattgtattctaattaaattattccaattatttttctgtctcctttcacaaagagagtagttattgggtaggaaatgcaagcaatcacattggggatatttaactcttttgggaggaaagaaaagatttagagttagaaagggaaaatatgaaaccatatttttatccattttattgccattaaaaatgtttttgcatcttcgttgataaaggtttaaacacagtatacaggagactagggaaaaacgtataggcagagtcagctgctgattatgtgtggtgagaagaaggggggtttcaaaggcagacaaatatattgtttgaacatacatggcaggagaaaaggttgaaaactctcactctaatctactgccgatatgatttccaagttcatctggtggctggttaacaaaatccaaccgctgcacatttgagacataattatgtggtagtagaaagaaagtttgtaatttataccggtgcctacccggtgttagcttccaggagacctgaccctttccccaacctctttttgaccaagccagctccactcattccccagtcagattggaagttacaggttccactggaaacatggtttatggataatgtatctataatggactctccactcaaaaccaatacagcagtagcatagccatcagcaatcagtccataaaatctgcagttgccttcctttttttcttaaagggggcaggaagctaatggatttgaaatagcagaagcggaccacagacctttttaataaatgaaaataaaattgagtctcaggtttatgttgatctatagaactgtgagtctcagagtcctcccactgtttccctcagggctgattcctagcctaaaccacccaacattcatagctgataagtgtctactgaagggtaataaaatacagtgtgtgtagttgtagagaatgtaacttatcactttcatcaaaagctccctgaaaatgtgtttatctaaaaggcttgtatgtttgtgtatatttcaaatatctttgccgttcgattgagctccttgggcatttaaaagctattccttgaaaaggcttttttggaaactgtttagctatgggttaatggttacatttccttggattggagatatcctccaggttacagaattcatacaaatatatacaaatgagacattgactgttacccaattttattttctcactaaatcaaggtaaagatttaaggcccaattcataaaagagaaaaaaaaaatctttatgtgggtgttaggtgatttttaactccgacacaactgatgctgggaattttccaagcatgtggctgcctagtggggaaaaaaagaaaaaagaaaaaacagtttgagatgttgagaaagaggttggggcactctggtaatagctatggaatatgactgcatgtcacttttaaaagctggctgtgctgcagatggtttatagctgctatatggatggtcttatctggaaatacttctggatccttcaagaaatggacggaaaaaaaagagttttgtgtttttttttgatcaaagactgagttttaagtgtctcaatggaatgttgaggttttccttaaggaaggtgctcactaaatatcaatgatgaaatcattgccaagggagttgcaaagaaatatcttttctgtgtgtatgttacctgcctagaggtatcagtagttccatctatgcttagattgtgtgtggaacaatgctttcaaaatgttgcaaaatgtgagtacattcctagttcagaaaacaagcagtctaacttgcctccagatgtccaatatctggatcatcacaccatttatggaacacttactatttctcagttacagtttcaggaatgggttttgattagggaaaagccttagatactgaatatctcccctaaacacacaagtcatggggatcacagtgtgatccacctggtgaatcaaggattattattcttgattttctttcagctgagagtttggaaaactcatttctccagccaccatggtggcttccacttctgggatgaactgaccaagaaggacaccaagaattcagatctggtggtgttgtataaagtcctttgttctagaaggcttttctttttcacttagtttgaagaaagatcttggtggataagttgaggccactcttgcttcattctatggcattcacgaagagactctccctgagagagtgaagcaattactaggttttgacaattacaaatatctctttcagtagataaagagtgtggtctttgtgactggcaatcacaaagtgttttttcattgataattcaactccttctcaaaattccataagctaatgaaaaatgactatttgagatttttagatttgaattatccagatctataatttatattaatctagttatctagacaattgtttatttctttactttttccacatagacacatcctaaaatcaagattttgggtacccaattagtttagggtctcttaaaaatagaaatacaaaaacactaaaatgtaacttaaaatactgaaaatagtaatatctaataacatttatgcactcatatattttggcaagttcacagctataagatgtggccccaaactggaagttcgtatcttcaggctttcttgcatgtgagctcagctactatgttccatttaaaataaaatcccaaattgggcttccctaatacgggagctacatcggaaaggcacagagggttacatttccagataaattagaggtcaaagcaaaaaagtactgaatgtagaacccagatcctaagtttctatcaagttattttcttctttggaaagaaaagactgttcccaaatagggtagtcagtttacgtaataggtaataataaatgcagacaagtcaatcagctcatgtggcttgtaattcaatccaggactcctaatgtgagtgggcaaagggaagtatttaggtgaactaaatacagtaggggcagtgatcatttttattcaggaattttatgtttggagatcataaaaatggtaattatagcaaatatctttaatagtcatccagcaggatggaatagaacctaaagacttttatctgtacctcattaaaaccagtccaataagagatccacacccctttgaagcccttctaaccatggttcttacactcgtgtgggatgtatatgtgtgtctgtgtgtgtgtgtctcaaggttctgtttgatttcatatacacacgaatctcaatatatacatataagctttgatacatatatgcatttcaatagctgactaagaactactatatatgaaatcaaaacatcaaatggaaccttgggagtagttaaagaattagaatcaatttgtgaaatcatcatgttacgattctttaattttcaaaagggaattctgaagctatgaggacacagtcagatggaacattttctcaatattatgatctatttataaattaactgaaacaagccagctctgacttagaaaacactttctggaatccaaaataacttccatccaaatccacatgtcagactcttgctttctgtttggaagaatttcctaattctctgaatttcaagacataagctcttataaaatgagcgttagacacatcaatatgttcagagactaaatctttttcaataggccaattagcaaacatcaatgtaaagaacttggccaacagaattttactagtaccttttaatattttagaaacttttaaggaaattatatatatttcttacttgatttttggtgtctcctctttcttcttcctcctgttcaaactcctttcttcactgcgttactactgtttggtttctgtcaacttcaccctcaattttggtgtcctaaacagcctatctgtgccaagggcatttcaaagaatgaggctccattttgaatctacagatgctattactacttatttttacagagtcaggccaagccaaatggaactcatttcaatagctgacaaattaccaaaatcacccatattataaattgtgtctcctgtaatatattgggattcttcaaaatgaggaaataaaagataggttctattttagcctgttaggatatatccaaatatttttaattttagaatcaggatgctaaacaaattagaagtctgaaaaccactgcagagtttggacacacatatcgacaggggtggagcagacaggaagcttcaatcttttctgggtagtggataaagcaccttccctgtggggatggggaggagggaaatggtaaaaacacccatatttctttaatttaggaatcccccaccctgaagggtatgaaagttttcaagtctgacttctctgacaggcagaggtggaacagttgaaatcagttcaaaagaaggtctgtcaaagagtcttgtcacaggtaaaaccaagtgctcagctattagtgacaaaagcagccaactcgagtgatttctctgccacatgtgctgtgacaggattgtagcagtgttcgtttacttaacacacgactccatgtgcacacacacacacttcagagaggattgtttttcacatgtatttcagttacatttcttaaaatgctgacctccttgaaatcaatagctaatggaattcccaactctggttgcattgctgatttatagacccctggctggccagatgtacagctttccccaagaaaatgatagtatctgtgctaatcacttcctgaataagttgactttccggccaatctctaatactacttacgagtctctccctttagcccttgagagttttatttcatgattttcatcttttatctctccttcactgggttatgtcagcttgctgcaaaaatttgtgtcccaacaggtgttctaaagatctcttgagtgaagatgcaaaatatgtgtgtgtaataaatggattttatctgtgaaataaattaatgttatctttttctatctctgccttgaactcagtcaaaatagataaatgcctttgtgacagtgaattcttagcaccaaactgttttgatcaaaagtaaaattatcaattatctgatttaatgctttccgttttttttttattattatactttaagttttagggtacatgtgaacaatgttgagatggagtcttgcgctgttgcccaggctggagtgcagtggtgcgatctcagctcactgaaacctctgccttacaggtgcaagcgattctcctgccttagcctcctgagtagctgggtcttcagatgcgtgctaccacacctggctaattttttatatttttagtagagacggggtttcaccatgttacccaggatggtctcgatctcctgacctcatgatccacccgcctaggcctcccaaagtgctggtattacaggcataagccactatgcccaggcctccaaatttcctttcccagatggagtcttttatacatttgcattttttcagaagctaaatgaagatattcaagttgaaatagtaaaggggcagtagtcacagaatactgcccaactgacctctcctttgcccttttctgagtgactctaagacactgctgcctccacactgagcttataaaccactactaggctgggctgggcatggtggctcatgcctgtaatcccagcactttgggaggatgaggtgggaagattgtttgagcccaggagtttgaaaccagcctgggcagtgtagcaagaacctgtctcaaaatatataaataaataaataggcacatcccaaaacactagactggatgtctatccagctgatgaaaatccccaacctccaaagtacagaggcagcagaattgttctgatccccgatagcccactaagcattcaagtctttctgtagaatcagatgtgaaatcaatattcacaaaataaattttattagagcattactaaccaccaactacatacaaactagatataatgtacactgtactggactgttttataagcaccatttttgttttgttctttaagagactaatagtgggattcttattcctaaactctatctttgtcactgtatggctttaggcaaattagttgtacttctcaacctcattttcctcatctgtaaaagataggaagcctatccacttctattatttttagggttgaaggagataatgaatggggaaaagtaagcacaatgcctggcacatggtagatactcaaagaacgttatctgaataaataaaatatataagaagctgctaatgccatcccaaagtttaccatctaccagtaaaaattcataccagtatagaaacttataccaacataaaccaattttgtcaaggtctttgtggtagaagtcagttgattcctaggatgagagtcaatgggtcttacaggatacttcttccacctctttaaggtcaggtggtctgttaccttaaaagtaatcagaccgaatttttccatacatcccaatcgttgattgttaacaagtgagctcatgctgccatccaacctgttcttgtaaactctgtggtgttccagttctctttttttaggcattattacgtgtgcagtgttttaaggttcccctaaggaagatgataacaatatttctgtaaaagaattcatctagccttctaatatgattgaaaaattccttattaagtcatggggcataggatccacttgactcgcaagaatcatagtccctctttaagcaaaagcagtgccagtccacacccttggccattagttctcatttcacccataaaaagtttctttgtaatatcctttaggctacttagtgaaccctctaatgtttatgtaggttagttacataattgaagcctttttaatgttgtctatagaaagagcactcatattagtacttttcacatgttaatagctcctaggacctacattgcaaattagagtgcttcacatgttaactaggtggccttaagatattaagacaatacataattgacatcatcgtattgcaagttacaaacagtaaagcagatacatgaaaacctttataggttgcctaatgtgacagaagtctaaaatttagagaaagccttgaggttatgctaatatgtcttaaatatctacagaccgttcctcggaaaactaccctgtattagtccattctcatgccactgtgaaaaaatgctgaagattaagtaatttatgaagaaaagaggtttaattgactcatagttctgcatggctagggaggcctcaggaaacttaacagtcatggtggaaggcacctcttcacagggtggcaggagagagaatgagtgcaagcaggggaaatgccaggtatttataaaaccatcatatctcatgagaactcactcactatcatgagaacagcttcaaggaaaccacccccatgatccagtcgcttcccactaggtccctcccaccacatacggggattatgggaactacaattcaagatgagatttgggtggggacacagccaaaccgtatgattccatccctggaccctcccaaatctcatgtccttgtatttcaaaacaatcatgccttcccaatagtcccccgaggtctaaactcattccagcattaactcaaaagtccaagttcaaagtttcatctgagacaaggcaagttccttctgcctatgagcctgtaatatcaaaagtaagttagttatttccaagatacaatgaggacacaggcattgggtaaatgctcctgttccaaaacagagacattggccaaaacaaagcagctacaggcccagtgcaagcccagaatccagtaaggcagtcattaaatattaaagctctgacataatctcctttgactccatgtctcacatccaggaaatgctaatgcaaagggtgggctcccacagccttgggcagctccacctctgtggctttgcaggctatagccactctccaaccaccaacccccagtgttggctgctttcatgggctgatgttgagtatctgtggcttttccaggcacatggtgcaagctgttggtggatctaccattctggggtctggaggatagtggccctcttctcatagctccattaagcagtgcccaagtggggactctgtgtgggggctccaacctcacatttctcttctgcactgccctagcagaggttctccatgagagctctgcccctgtagcacacttctgcctggacatccaggcattttcatacatcctctgaaatctaggtggaggtttccagacctcaaattcttgacttctgtgcacccacaggctcaacaccacatggaagctgccaaggcttggggtttgcactcttgaagcaatagcctgagacgtaccttggccccttttagccatggctagagcagctgggacacaggacaccaagtcctgagtctgcacacagcaagggggccctggacctggaaggggaaaccatttgtccctactaggcatctgggcctgtgaagggaggggctgctgtaaaggtctctaacgtgccctgcagacattttccacatcgtcttggtgattaacatttggctccttgttacctatacaaatttctgcagcatgcttgaatttttccccagaaaataggttgttgttttttttctattgcatcgttgggttgcaaattttctaaacttttatgctctgtcacctcttgaatgctttgctacttagaaatttcttctgtcagatgctctcagtcatctctctcaagttcaaagttccacggatctctaggagaagggaacaaagcctccagtgtctttgctaaagcatagcaagagtgaccttcactccatttcccaacaagtttctcatttccatctgagaccacctcagcctggacttcattgtccatatcactattggcattttggtcaaaaccattcaatcagtctctaagaacttccaaacttcttgtcttcttttgagccatccaaactgctctaacctctgcctgttacccagttccaaagtcacttccacatttttggatatctttgtagcagcaccccaatcctggtaccaatttactatattgtacatatcacgtacaatatgtacatatcacacatatcataccctataccttatcctccaaggaagagtgagcctaaacatgagtgttttgaaatctctatggagtcacacttgattagatgaggaatgcataatggatatttggcagcagcttatctgctgatctgctagttagcccagtatttctatattaccatattattgacatttggggcaagataacacttcattgtgtgcgacaatctcatatattatgggacagatggtatctgctttccaccacagaccatgttcccttctccagtcatctcgacaatcaaaaaaaccactcacaaatgttcaaatatttctgagtgggaagaagtgctaccatcagttgagaatcacaagcctagctaataaaatggctatcacaataacattaactggaaaattcagttcctaggccttagggaaattataaacaagtcccctccactcccaccccattcctaatactccctccaatttttgtcaggtctgggataagaataaaaacagaagctaaaatatcatatacctaaatatttaaaaattatatatcaagccaataagctggataataaaatatggtctaccttccaaatttgacaaatatatcttgtaaggtcctggaaggccaggttaaaatgtaagattctaagaatccttgccctctcctaccacagtgatgctgcgtggggaaaagtaggcattgctcctggcttgagacaaactccctcttctctttttgtcctgtctctttcccatatgactaaggagaccttgtactcatgcatgtggaaatcagctcacatatccagtctctatattttcacaaacagctgccccttgagtggttccctggaaggcctggaagaaggttctgggtcatcagaagagggacttccagggacccttgtttttcagaatatggtctagggagggcagagtgcaatgtttgctctactttgcagatgccttgccttatggagaatggtatggtcagagaaaggccagaagaggttttctaaaatgttttgttccagaaagagtcccatctttctaactctagggatggaaccaattttaagctattgtagagatggagcataaactatgaatgcacagaaactggtaggtagaaaagagaggtatgcaatataaaggaaagaataaattggttgagtgtgaaaagggaagagtgaaatgccacagagtagtggaaaaaagcaatcaagaagctgcacaaaatcatgttacttaagtatctagagtttcctgggactctgcatggatctctcattcctgtgtcttcttggggccatgcctacatcactggctttttgtgttttcctgtgtcctcatgcctatgtatacttagggtaaacctcaattattggaagtaacttgaactagtgtgttgttacagataaaacaacctaaataaatcaggagcacttagaagacactaaatactctggaaggggacatcatgtgaggtgagtctaagataggcagccctggttaggaaactatatgagcaaataagccagtgaaagttggggtgaaggggtagagagaagaagagtgggtatcctcttttagagattaagacaatggtggctgacttaaatggttcgcttcctgtaagacttgaaatctatcctcccataaaactcatagaactcctaacctcctatagcccagctaggccatggcctacctgagcaccatggacaagcaggagaactcagcaccagaattcacagcattgcttttctggagaaccagtctcagtttcccaaaatggagtttagaagctcacatttgggaaaaaaaaaaaaaaaaaaaacaataagattatggatatttacctagactactgtattttttatttgcaattttagacaaaatgttaacatctttaatcataaattaactctttggaaatcagtacaaggagactaacattacaagggaagtgaaaataaaaggaacagaggaaaatggaatggcacaaatgagttataaggctatatgaagatgatatacttaacattaatagctgagaaagcaatttcaatataaattacattatcaatccttacaaatactgatatctgatgtttgcacagctttaggaaatgaattattctcaaatactggggaaacttactctagtcatggggagtttactcaaaaatgtagatttttgcataaacttggccttcgcagttccaaattataggaatcactccaacaaagtagttagacatacaatcacacacatacacatacatgtttactacacagaaaatgtgtaagtaatatatcatcccccgagaaactacttatgtctcaactggtttataaaataacagacgggggtggggggagaaatagaaaaaaggcacttaagtaaaaatactacatttcacaaaattctgtgtctttttaattcttatgaaacatttttaatgaatcagttttatatttaccctattgttttgaagatatttttcagaaatgtgtacatatgcgagtgtatgtgggtgagtgtaggtgttaacagtatagaagccttgcacattatttattgtttttattcatagatctgtattttcagcccctgaggacaataaacatcacagtgttgacatttgctttgttaatgttaattccagtacactggtgatgatcgcagaaagatatgatcctgggccttgaagagctgacaatctaagtcaactcacagaattttacgtaagtacccaccatggtgtatactctcaatggaaaattttcaagtaaaatttggacctattgttatttgtatagcatatattataagtgtagtttttcttttgatgctgctgcaactcttgttttccttccatcctcttatcatgtttccatgagctgttgagtgacttctagatcccattatacaaaattcaatccaaaagatatttactggataccagtaatggacagggcattatgcaatattatacagctaagacaaaaacatgagtatatcccaataagttaagaacacgggccgggtgcagtggctcacgcctgtaatcccagcacattgggaggccaaggtgggcggatcatgaggtcaggagtttgagaccagcctggccaacatggcgaaaccccgtccctactgaaaatacaaaaattagccgggcatggtagcaggcgcctgtaatcccagctactcaggaggctgaggcaggaaaatcacttgaacccagagggtggaggttgcagtgagccaagactgtgccattgcactccaacctgggcgacaagagcaagaccctgtctaaaaaaaaaaaaaaaaagacaggccaggtgcggtggctcgcacctgtaatcccagcactttgagagcccgaggcggggggatcacgaggtcaggagttcgagaccagcctgaccaacatggtgaaaccccatctctactaaaaatacaaaaattagccgggtgtggtggagtgcacctgtggtctcaggtacttgggaggctgaggcaggagaatcacttgaacccaggaggcagaggttacagtgagctgagatcatgccactgcactccagcctggcctacagagcaagactccatctcaaaaaaaaaaaaaaaaaaaagaacataagatctggagtaagcctctgtaggtctaatcccagcaatgccacttgtttgctgtgtgcctatgcacaagttattcagccgccctatggcactgtttccaaatgtctggaaataaggataatgatagaaacttcctctcagagttgtaagtcatgctccctaaatctgcctcatcatgaacaacaatgacaccttggcaatggaagtcttgtgttccaccccagccattccaaattagcattttcaagaggaaggcctagaaagcttattcttgggattagacaagtatggaacacatggagatcctgcatgtaaaagtgctcatcaatgtgatggtctgcagaaaatttcaacaatttgtagtggtagatttctttgccaaaagagcatagcagtttagtattaatatagtggctatgcatctagtcaccacaaaggcatgcaaagaaagaggagagagtttaaacatgaaaacaataatttatcttttggataaaaagaaaattattaaggaagaagacattgaagatggtcttgcagtttgatgaaatatctctatgaagatttgcagaggcagaaaagttccagagagagaagtgacttgtacagtgtagaggatacagcatagcagaaagtgtatgtcagcaaagacaaggagttcagcgtggtaggagcataggaaatatataacgttcagaatgcacctaattttggtcataggctttgtaagcccaaaatgccaaatgcctactccagtgcctttttgatattcacaaactcttgcctgatcagtgatcatgggatgatacagacgaacattctattcaatcatcacgctgatgtcagtgataggaacaagttatgcaactcagatttgttggtaatattccaatattttctttctcaaccttgacactattgcaatttgtctagaggctgacctgcccattttaagatgtttttcagtatcctttacctctgctcattagatgttggtagcacccctcacacaaattgtgacaaccaaaaatgtcttcaaccattgctaaatgccctctggggtaaaaaaaaatcatccctggttgaaaaccactgaaatacaaaattcattctagatataatttgaagtgaaaatcttaagtgttttgcatattgaaattcaattagtcaggtaaagtataatgtatacgtatgaataaagtcatacattaattattgtgatagacattaatataatgtccaaaagcagttaaaaatgttcaactagttcaaaactaacatatatataataaattgatatttaatacaaatattaagaaaaagcataactagaaaattgggtaaagcataattttcttatggtgttatcaaatattctatacattaaatgattacagaaaaaacaataggaattctatcatattgtaattctaaggtacttagaattgtttggtatcctaacattcataacatcagataaattttcctttaatgtgcaatgaatttatagtgaattaactaaatttaggccataaacatgtaaagaaccaaaaaaaagttgttatatttaaaattatttgaaatcttatgagaaagaactaaaaggagatatcaatttgtcactaaaaatgtaatgcaaggaaaagctaaacttcaaaatgaaatataaaaaagagagaaaaagcaaaacaaaatccccaaaacaaaaagtaaattacaataatattgataatcatctttcatctagatatattaatagttgagaatttaaagaatgttaaaaaaagaaagtgttagagaaaaattatatacctggacatctagacatattttgcttcaactacttactcaaacttcaaaagcacagatttacaataataatttaagacaattcaaagcagctttaagtctttagagataattactattttttttagatggagtctcactctgttgcccaggctggagtatggagtgcagtggcacagtctcatttcactgcaacctctgcctcccgggttcaaacaattcttctgcctcagcctcctgagtagctgggactacaggcatgcaccatcacactcagctaatctttgtatttttagtagagacggggtttcaccatattggccaggctggtctcaaactcctgaccttgtgatcccccaacctctgcctcccaaagtcctgcaattacaggcatgagccaccgctcctggccagaggttcaatttttaagtgaaaaaaatgttgaaacggtggcttaccatctgacctagcaatcccattacttggtacatattcaaaggaatgtaaatcattctgttataaagatacacgcacatgtatgttcattgcagcactattcacaatagcaaagacatggaatcaacccatatgcacatcaatcagattggataaagaaaatgtggtacatatacaccatggaataccatgcagccataaaaaggcatgagatcatgtcctttgaagggacatgcatggagctggaagccattatcctcagcaaactaatgcaggaacagaaaaccaaacaccacatgttctcacttataagtgtgagctgaacaatgagaacacatagatacagggaggggaacaacacacactgggggctattgtggggagtagaggaagggagagcatcagcataaatagctaatgcatgtggggcttaatatgaaggtgatgggttgataggtgcagcaaaccaccatggcacacgtttacctatgtaacaaacgtgcgcatcctgcacatgtaccccagaagtttaaattaaattaaattacattttaaaacagaaatggtcgcttatagattgccagtaattgaagataaaggggttttgaaggttacataagtaataaacttgaagaacaaagttatttcaagaaacatttaaaatgttgataatttttttgataacagacttgtatttcactctctgttatcaagaaattaccaagatttcaaatgtaccatttgaacatgaaaatatgttcataattacccacatgtaggttaaacaaacaaacagaaaaaaacaggttggacatagtggctcatgcctgtaatcccagctactcaggaggctgaggtgggaggattgcttgagcccaggaggtcgaggctacagtagactgtgatacagccactgcactccagcttttatatatatatatatatatatacacacacacacacacacacacacacatatatgtgtgtgtgtaatatataaaatatatattttaatatataacattttaatatataaaatataaaatatttttaatatataaatttttttttaaaaatctaggggcagatatgagaaatgacttttcctacaatgtaatgtagcccacatacatttgacaactatgatttttaatgataaaataagatattaatgaaattttttggtacatttttatgtatgtcttcatttcccaaaagtcatttctgtggcagtgctctttgacatcagcttctattttggatttggccaaacattggttgtagggctagaccatgggcacttggccaaaatgaatatttagtacatctctacatatatagtgaagtgtgagagaagctgataatccagtttagaagttgtaattcagagggcctcaaatgccaagaagacgagacaatgtttaatttaattagcaaagaaaaataagtgaagacacttgctcaattccacaacgagctagaagttttgcaatttaagtaaatatttagcatgtattgtagaaataaaatgaattgtagatgttctgtcattttcccctgtgttaatgtaattcccttgattttaacattgaactaactgttgctaattttgctatcactaaggtaataagaacttacatgtatttaacagttactgtatgccaatatccctgaaaggcataatcacatttaatccttgaaatgctttacaatgaatgagctgtaattattcttattttatataacagaagaaatgggtaaagttgctcataagtaggaaatcaaggattcgaatccagggtctgcactcttccttctagtgataaattgttcatgggatgagtttaaaacctaaatcagatctttttatagtcaccaatcattaagctaatatcacaaatactttttcgcttgtgttttattaccatcatcctagatcctaaattgagctttttaaagggagggatgagtaacacaagagatttctatggtggtgaaactactctgtatggtactataatgtggatacgtctttaaaaatttatcaaaacccatagaacctacatcatcaagaatgaaccctaatgtaaactacggactgagtgataatgatgcgtcaatgtaggtttatcagttgtaacagatgtactatctggtggaggattttgataatgggggaggctgtgcatgtgttgggggtgggggtaggtgggaaatctctgtgccttctgcttaattttgttatgaacctaaaactgctctaaagaataaagcctactttttaagaagcactcacaatattctggtagatattttctttagtgtttccttcagtgcaatgtaactaatccctaacacatgaaaaaaaaaaaaaaaagcctaaatagagaacaccctttccatttgattcttgatctgagcacaactagtgtgaccttgaaagcagctcttagtctttcggcaattaaatgtgcatgttatttaatttccattacatacatcggagatgagtgtttgcttctattatataatgttcatcctacagatatgttgtatatcccagatagaatgcttactgtgtcaaccaacacaaagcatatgtataagacattctgctcataaattattaccgaagtgatctcatgaatgtgaagaggtctgctcatgacgtgtgaggtttcccaaagttatctttgattaaggaccagatgtgctgggcttaatggagaacgttatataaagactgaacaggccaggcgcggtgactcacgcctgtaatcccagcactttgggaggccgaagtgggcaaatcacaaggtcaggagttcgagaccaacctggccaacatggtaaaactctgcctctactaaaaatacaaaaattagccaggtgtggtggtgggcgcctgtaatcccagctactcggaaggctgaggcaggagaattgcttgaacccgggaggcggaggttgcagtgagccaagatcacaccactgcactccagcgtgggtgacagagtaagactctgtctcagaaaaaaaaaaagactgaacaaaccaggacttcctcacatgaacacaggcttcatccatcacgtgcagcctttgttgggaacattagatgctggccatggcatattcttacccaacatggttcttcttcatgtcttagtcatattctctgcttccccgtccttttcattcctagaaacctggaaatctcagtccagcttggtcacatgacctcccgtctgaattatgcctcatgtgtaatagagattgtgaatgatgtctcatccaccatccagtgttagatatggatttagcattccagatcccagatagggcagcctgatgtgacagttctcaatttttttcaagcttctcagccaatcagatatagatatgtacagctacaatcaggaccagacaactgtgcagggaactgcacttatataactcctccattatgtatgctgtacagaggagcaatgacctctccaataaatctaccgtgagcactcctgaggctccatcagcaattgcaggcaatcacttaagaatagaaatagttatttttaaaaatatattcctttctaggatagctgtaaaatgtgcatgaactccatgccagcctgtgacagggaaatttagttttaggtcactcaatttatgcctctgaggggaacaaattccccagaagattaaactttcattaggttctttcttttatttcctgcctttgcacccatcatatcgtaagttccataaatgatgtcttactagggccataaaatggttgcccttgaactttaggaacctgtcaaacacctctctctctcccccttaccccccaataaaaaaccttttagagaatggtacttaaattgacagtttcagtggtcaccctcccctgcctatgtcaatgagaatgtgcctagaagagatggagaaagtaatacgcactttagacaattgcattgtgaagccgatagtccacactcccctgcccccatccccctattgttttgactagacaggggatcatactgaatagattaacaagtcattgacttgggacacctactgcttggaatgtcattgcacttggagtgaaaggggataaaaatgtctcccttccatccctgatctctctactctgtggcaatatttctgccacagaaatacttggctgtcagctccagcaaagcaaccctggatagccacagtagtttgttgtcagaatgaaaaatggttccgtgcaaaaggtctcagagccgggatgctaaaaatcaaggagtcctaagtcaggcatttgacagagaactttggtctcgctgttaaataccacttaatactgtcctgcctgataatccctgctgtttaacaactgtgggatcgtggctcagctgtggcagaatgctttttcgacagggagaaaatggtcagatgtcatctatttgcttgaaagaaaagaaaatacatctcttagcatccagcgaaaatgataatgcttaaaaaaaaaagaaaattgcaaatccattctagctttgattcattagagagttcacagccaagagagagaaatgaaactctagctgaggttagctataggtgaagaacaaagaagcttgatatagccattagtactctagacagtgctctgatactccaaatagttagctggttagtgaaaaaaattcaagctaggcatcaagtaatgcctacaactaacttttttgctcactgtgtagtcttgggcttagaactgtgtactagttcatgtgtttgttggagtgtgtgtgtgtgtgtgtgtgcgcaaggccaccattactgcaataaatattataaacaacttacttaacagtgctaattgcctctgttgttttccaagcaagatttaattattttagtgccaattatctcacctagagccacaagtgatagtttttatgaccttttataaaagtttagagttgaaataacatgaaaaatctaacccagtttccccgtttttctaatggtttcttagataatataattaaatgatgactatgcaaatggacagttattctgtgatgcttcagaaggaagtatttaaataaacaagcaggattcataaagaaatacaacttaattcagtttaagggtaacaaaagtttatcaccacagtggaccaaaacaagtagaagcttgattaatcaaaattttctaagtcactgagagtgttcagacagaccaggtagccttttccacagatacagggcatgggattatttacagaggcatagactgtaatctgttacttgttcaccaatttttaggatactaaaatacgaaatagatatacggagattatatgaatcagttatctaacacacagttatgtagaatgattttgtcattggcctaagtattgtatcctctttaaaactgcctttcaactttattccctagcttggagtttgatatccccatttctttgatgtataaatattttttatattatccaagaatagttaaggcacatatggagaatttgaatcccctggaatgagactaggtcactgtttcttgatttgggggatctaggaaggctacactatgcatttaaacctgcatctaattcaatggacatctgtgacagtcaatatttcctaaatgtttcaagtcaccgctacttactcacctcactatacctcaaatctcaaaccaccaaacaaacagacaaaagcaaagcaaaacaaactctaatggttttgtaacttcctattatatgtaacagatttgtaaaactatgtcagattttccctgccatgtgggaagttcctctaaatgagcactgatagctgacgaatgttcatttcacaatgacaactagcataggatcttgctttcagcaatatataataccatgaattttctaaaacatattactgtttctaaaaagctattgtttgcctacatgtaaaaaataagcttttaaagacaacgacagcttcttttaacatattttagtaacatatttataatcgcacattatattaagattacatttgaaataattcattgtccactgatatctcagaaaaccattttctttcaaaaccttcaaggagaggagtttttaaagggaaaaaccttttgagtcatttatcaccttttttggcatagtacgaatcttcatctctttttttttttcttttgttgagacagaggctcactctgtcgccccggctggagtacagtggcgccatcttggctcactgcaacctccacctcctgggttcaagcaattctcctgcctcagcctcccgagtaactgggactacaggcacccgccaccaagcccagctaatttttgcatttttggtaaagacggggttttgccaggttggacaggttggtctggaactcctgacctcaggtgctccgcccacctcagcctcccaaagtgctgaattacaggggtgagccactgcgcctggcccatcttcacctctattaagtatttctgtctctggcctttatgcattgatgaaggatgttgttgttggaagttatatcacaggccacatatgcccatttggattccacgaacatggttgttttggttcagttttctggtagctgttcatctgtgatagtcaaaccaagcttatttttcaaagggatccctaaaggcctagtttacaaggatatcattttcacacaccaaaaaaacccttatttgctcagataatttttatctctgtctataaaaagctagtattgatcaatttacttaaagctaatgtatcttttcaaactactaattgcatttcaaaataaataattaatagagtaacctataataggagaagccttgcaaagattgaaatttaaggagaattatgtttttgtttgttttgttttgttttgttttgtttcagacagggtctcatctgtcacccaagctggggtgcagcagcgtgatcatggcttactgcagccttgactttctgggctcaaacagtcctcccacatcagcctcctaagtaggtgggaatacaggcatgtgccactacattcagctctgtttttgttgttgttgttcttgttgttctttgtcaatgatgattgacaatgatgattttgtcaataaaatagacttacatttagatatatatatatgaatttccttttagatcctacattctccttagaatgttagacattaaaatgctctgagattctgctgtttaaaaaaaaaaaaacaaaaaaaactaagactcaaatatagtcatgtcttcaaccgtatcttgcaagagttacatgaagaataaaaataatgtgtatatattgtctgatatggaatgcatacacagcaaataatagctgctacttttacaattagcatttgcttagtcaatgtttatttaatgaataatatatggcagtcaatgaatatttgctatgtactaaatgctttgcttacaaggtgttatttaacaatggtaactcttcaatgagaaatacacctttcaatccagcattttttgaggaggaaattgagattcacaggacttaagtcacatacatgtctagaaggtggtcagctaagtttccaacgtaggtccacctgactcaaagtgtgctatattgtcctaaattgacatactttttaatacatatgccatattcaaaaccattatgggacaattgcagagtaataaaatttgtatcagtagtcactgttgaagaaaaatactttatttcagccccctcaagatctctagcataattgaccactgggaccaatgataccaactatagccaaacattacttgttttcttttttggatctgcgtcttgggtctccagaccgtgtgcagaagaaggaagttcaggtctctgtgtcctctgctggcacacctgactcatctgggttgagtcagcactcttgccccgggacctttatgtaccctcccaaggtttctttactgctgtcttcttactagtgtttatggtatacacatttactatctgggaggatcagcagatggaaaccccatgacttgctaattagatctcccaaagatagtgtcaaattaaaacctggccctctaaattcacataaacaccaagggatgcaactgccaaagatggggctctcctggagaattggcagcttctttctccctctaaccattctcttatctgaactgaagagatctgcctccagcacattattgcccccagcacttaatgagacttgagtaaacaacagtggtggtgagcacagggtgttttcctggcccaggtgctcggattttctgaaaattaaatccagtgctgaggcagattgaaggaaagaatacatctgcagctcaaccccgtcagcatgtggagtcaattctctaggtagtgtagctgtcagggatcagctggatttgactcgtagctctgctgtgcagtctcaggcaagtaacttaaacccgctagtctcctgtctagtcctcagcttcctaatttgcataatgaggatcggtaagctcatagggttactgtgagtttggaaaatgcaggcatagcacttgcacaggcctgctctttaataagccttgaaaaatctaagctctcatttgctgctacttctggtgtagctattgctcagtgggctgaaagagtaaagggaaatgtggtcaaatcattcccaagtcctgtctacatcaagaacaagacttgaagcaagcatggaaaatggccttgactcatcttagaaatcagagagagggccaagggtagtggttcccacctgtaatcccaatgcttgagaggtcgaggcaggaggatcacttgggcccaagagtttgagaccagcctgagcaacatagtgagaccctgtctctaaaaaaaatacaaaaagtagctgagtgtggtggcctgcacttggggtcccagctacttgagaggctgatgcaggagtattgcttgagccagggtggtggaggctgcagtgagctatggccattgcactctagcttgggtaacagagcaagtacccatgtaagaaaaagaaagagagaaagagagagagaaaagaaggaaagaaagaaaagaaagagaaagaaagaaagaaagaaagaaagagagaaagaaagaaagaaaagaaaggaaggaaggaagaaagagaagagaagagaaaagaaaagaaaagaaaagaaaagaaaagaaaagaaaagaaaagaaaagaaaagaaaggaaagaaggaaggaaggaaaagaaaagaaaagagattcactgagactctgccaggtgagctggaaatcccacatgaatccctcaatctctggtttgatgggatgtgcttgcaaagaagactgaagagaaaaagaaaaagagagaaaaaagaaagaaagaaagagaaagaaaagagaaaagaaaaagaaagaaaagaaagactcactgagactctgccaggtgagctggaaatcccacatgaatccctcaatctctggtttgatgggatgtatttgcaaagcagattgaagagaatgtgtcagagacacttctagtaggtaacacgacagggtacaaagcattagagttttatcagttaacttcgaaactcagctccatcactcaatactttttttttttctaagttaatttccttggacctcagtttcctctttttcttaaaatattgatataatacttcccttcccaaattattattgaatttaaatgagataatgtttctaaagcatttaactcttctcccacaagctggggagcaataatgttaattcttctactcttatacttctccactttcccctccttacactctagtgtttatttcataatatgtaggacaataaaaataagttacagtgaagcaaataagaaaaggtaaaagttgtgagtagaaccaacggaaaatgtgtaagaaaaattgagtgcacaaatttctaagcctaaaaataggaaaacacaaaatattagatatgttcagagggcatctaataaattgagggtcacatcaagagagacaaatgccctattttccaacaaagcattcattgttgctaccgcaaggggcaaaatgctattctgaggtcagatgacaggttttgggtttttgttgttgttgttcttcgtaataaataaatatcctttcatgctgtgttgttccaacttttcagttgtttactcaaataaagtcacacttccacaaaaaccacttatgattccaaaaagaccatatatcagagtcacatggaggaggctgataatgcctccactttgatttgaggcattttggactccctaagaaaaagaaagggttgcccagtgaaagagttcacagccctatttttggaacctgtttttccagtacagtaaagagactcaaatattaagaccctgagtcctatccgggctccatttgagtcaaatgtaatagatgggaggcctgactccagagaccacacagcaaaccgcatcctgacgcagtggctccaccaggcacctgctggattgagaaatgcagggcaagtcagcactgattcattgcccctgattgacaagatactatcattcaccttttcctgagataaaccagagtctcttgtgaagacctatactaggaagtacatcccacatttcacaaatggtaaaaatacataggtaagaaaaactcaaaaatacctccataattttcaaaaacaaaattcagggccttagtctgaatttatattaatggagatgaaggggacaaaacattaagtggggactccttttctgccattgtgtgggaaaatcctgcataatagacaatagtctccttattttgtagagtaggaaactaaaacttagcttaaataacatacaattagctaagtggacaggatatgatttaagcttaagtcttatgatctttctactctcccatcatacctttaacctctaacttctttcctttcttcacactatcttcttggcatgtgagacttaagatttcctaaattcaggccggccacggtggctcacgcctataatcccagcattttgggaggccgaggcaggcagatcacgaggttaggagatcaagaccatcctggctaacacagtgaaaccccgtctctactaaaaatacaaaaattaaccgggcatggtggtgggcacctgtagtcccagctacttgggaggctgaggccagagaatggcgtgaacccaggaggcggagcttgcagtgcgccaagatcgcaccactgcactccagcctgggcgacagagcaagactctgtctcaaaaaaataaataaatagaaaagatttcctaaattcatagcctgatgctgttatatgatgggtttgaaacttgtgcctgagccactgtaaggaacaatggtcaattgtctcagttggggactaattctacacgcaatgagaagagcacaaacttagaagtcttgtttttcttttctttcttttttttttttgagatggagtcttgctctgttgcccagattgaagtgcagtggtgcaatctcggctcactgcaacctctgcctcccgggttccaacgattctcctgcctcaggctcctgagtgcctgggattacaggcgcgatttaccacgcccagctactttttgtatttttcgtagagacgggatttcaccatgttgttcaggctggtctcgaactcctgaccttgtgatcctcctgcctcggcctcccaaagtgctgggattaaaggcgtgagccaccacacccggccatagaaggcttgtttttctacagatcgagtcagggtttagagaatagtggagaaagaacagagtcatgaaacttcaagaatttagaaagacatgtaaagccttcagtgctgataattctcaactgaaggtgatttgaaaatgtctagagacatatttttcggtgtcactaccagggaggggcagggttatcatactggcatctagtgagtgatagccagggatgctgataaacatcctacagtgcataggacaggcccctcaccctggaccccaagaaagaataatcacgtttaaaatgtccatgttgtagaggttgaaaaccctgttggagactataaactccttaagtaggactatggacaactgaaagaaactggatatttatgaataaattaatgagtagataagtgaatgaatgaatacatgaatgaaacaatgagacttgaactaacattcaggttattaagtaactacatctggtagcaccactgagacgtggaaagggggtcttgaatcatatctttattaaaagattgtatacatcgcaattaatatgtatgattatatgcttgtaataacatcagttaatccagagggtgttaaagataaatatatttatatccattttccactctctgactccaacatggtggcttgtgcagataataaataattatgtgaaaaattataattatgtacatcattaaaagtttccaatacttattattgtattctttttttaattccttgaaactcatgccttgtagtgtgtacttttgctttagctttgatttcaagaacaaactagctataatacagggactgctgtcaataataagacttttgctgttagactctctctcactttccctctcctttaagtttgggccatattctcaacagacattagtcaaccaaactggggctggtgcaggtggggttgttcaagcttgtaatcccagcattttgggaggccaaggtgggaggatcgcttgagcccaggagtttgagaccagcttgggaaacatagggagactctgtctttacaaaaaatacaaaactggctgggtgtggtggcatgcagctgtagtcccagctgcttgggaggctgacgtgggaggatctcttgagcccaggagtttgaggccacagtgaactatgactgcaataatgcactccggcctgggcagccgaacaagaccatagtcactaattaaaacaaacaaacaaaaaaccacaagtgcaaagagggaggggaaaaacattcataaaaactatcacccttctctgcacatgtaaagcaaccaaccaataacttcacttcctgctatgattggtattattatagtgcagctcaggaagctgagtttcattacaataaacctatggtttcactaaggcattttcccatgagaacattttaattaatttattatttgcaaatgaagctacaggtgtttgagtgggttggtagtagcagtgatgtctgtgtgtgtgtgttcgcacgcgctagagcgcatgtgcatgagtgtatgtgtgccttaattgcttctatatctgcctctccggctcagcctgtccaggccagctggcagcccccagcaactgattcccagacaagtctctgccggcaacttgtcacgtggtgatgggatgattctgtcaggcccacgcagctatgcaggaaaataaaattgtcataataagatgctggcttcttggcaactcgaccctagttctggggtagaggttggcagtcatcctccttagagactgagatgttctaactatgatcaaatgtttagatattttttaaagctgcttctttgtcccaaggaagattttgttctctcatgccaatgctagcaccttactaatgattttcagatatattttctaacctagagatatcaactaagacttggtcttgctctctcagcacaaaacatttgcaactcggtttgggggtttcaacaaagtgccacttaaacttgacaggcaaagtttccaatatggctatttcttaggagggaattggcatggtagaaaaacctatgactttggggttagactgagctgagctttaatccaagttctccattcaagtagggattgagcaacatagctaaatactagcttgggagtctagctttgcccattaataaaatggtaagaaaaacaactatttttggaccattgtcaagattagcagaatgtgaagatgagctatttgacacatagtaggcactcagtaaatgtccattaattattaatgccatcactattatttttctataaaccctccaataactattgggttctttttaattctcagctctatgcttcccattttaaaaatgattctattttctgtatttttagtagagaagaggtttcaccgtgttagccagaatggtctcgatctcctgacctcgtgatccacccgtctcggcctccgaaaatcagctgggcgtggtggtgggcgcctgtagtcccagctactcgggaggctgaggcaagagaatggcgtgaacccgggaggcggagcttgcagtgagccaagatcgcgccactgcactccagcctgggtgacagagcaagactccgtctccaaaaaaaaaaaaaaaaaaaagattgcattttctaaattgaatataccaaagtaaacacttaaagcaaagcaaagcaacctatttctgcattgctcttttccctaccatgtcaacttatgactataacttgctatggttaattatttagctgtgtctgtgctctgtctcaagttaaaagttaagtccctctagggaaggaactatgtatttaccactttgtgtatttttcacttcctcactgtactagaaattactagtcttagtagaggtctcagaatattcactgacatgcttctgggtcataatcaaacatttagggaggaatattactcaatttaagtaaaaatatttaagttgaattaccaataggatctataactttcagagtatcctgcatctacggttttaaactcaggtggagactaatttataaaaaataaggataaagtataaaaacaataaaaataaatagataaataaacaaataaaagtcatggatgacagtttttagcatttatattttagggacagagtccaatatgctactataatatacctccatgtgtatccctgttcaaaagcttattgctaattaaaataaacattagattcctgaggtttactgaaaattttattgcattaaaaaaaagcaagtgtatgtgagatggtaaaaaaaaaaaagagcaagagagagataaaagttaattaatagaatctggccttcttccaaaatatactctgagtttgaggtatttgggattgggtaatttaggttggttggtatgtgaaaaacatctgtcatgatgagtcttgctataatatgcgactcactgggaaggcacggcaccatcttcatcatcacgatgggcttcaaatatgtgccactttcggcatgacaccattaagtgtctgggtccttattgggcaatattctgtattgattataatatgttttaccttctgaggttggcttggaaagttgaatggtaagcaaagtcattagttgcccttggagttgatttatatctccattgggaggtagtttttccaccactttttcttaaatggagttgggtttggagtaccctatctggtactatttataatctattagtccccatttactacagggtctggaactaattgcacataaaaattcccaactagtttctgaatcaaaatagttatttttatggctagagccaggttttccaaagggtgtaccatgaaatactagtgccataagatgctccccaaaaagaattttattgttcaaataaatttgagggaaaacagtccattgatgctctcttttgttggtatattgctagattttggggtccacaatagcagaatcagtgtaaacattattatcgttgaagcaactagcataatgaccagcaaatagaagacatgtaaaaatattatcgataaattaatgaacacttaaacaattctgcagtaaagaaagcacttagctttgctcatttaaacatttcccaatttgtaacagtcatggaaccattttttcgcataaaaaacattataaacagcttatcttccaaagaacatcttgtagggaactcttgtctagagtattaaacacattcattaaaataattttatgtatacattcactcattcaatgttcatgttttagtacctactaagttctatgttccgggaacatattaacaaaacataagctctgccattattgatcttttagactactaggagaaatatgacagagtcttgtttttaaaacaaggcaacatgtagtaagtgtcatatgagaagtgggaatacgaagattacaaagtgagaaatgaacaaaaaatatccacatttggatatcctcctcatgatataaaatttaagaagtagtgttcatttgtatgatttatgaaaggttatttctcacactgcaaaggtcaagaaagtaccacaaaataatgaaatgctctcactgtaagacaaaaaggagtagtggagactgtttaaaaagtttatgctcagccgggcttggtggctcctgcctgtaatcccagcactttgggagaccgaggcaggcagatcgcctgaggtcaggagttcgagatcaggctggccaacatagtgaaaccatgtctctactaaaaatacaaaaaattagccaagtgtggtggcaggcgcctgtaatcccagctactcgggagtctgaggcagaagaatcgcttgaaaccgagaggcggaggttgcagggagccaagatcatgccattgcactccagcctgggcaacaagagtgaaactccatctcaaaaaaaaaaaagaaaaaaaaagttcatgctctgttctcactcataagtgagagttgaacaatgagaacacatggacacaggatgggggacttcacacactggggcctgttgggttgggggaaagggagggagagcattaggacaaatacctaatgcatgcggggcttaaaacctagatgacaggttggtgagtgcagcaaaccaccatggcacatttatacctacgtaaaaaacctgcatgttctgtctatgtatcccaaaacttaaagtaaaataaataaataaataaaatacctataaaaaagttcacactcatattaaaggacgcagttggcaaatggatagaactaactattatcatggacttcatgctggcaagtcttctgatctgttatgagaagtcacaaatctggattttgatctacaatattctcattatatccttatttattttacatatcaacaaagctgactccattacacacatatacctatatacttgtaaggtagattaaatagacacattaacctttttttcaaaaattatgctaaaattacaataatgcatttttttttttaaatacgtgagccttgaggatgtacaaaattggtgaaggacgatagttgaaatgttgtggaagctggtaaggggatggcccagtggtaatggatttagctgacccaagaaagcaaaatcccaagcttggaatgaggaaagctaaattctctcagaattttcaaaaaagctcagtcagtggtatctcatacctctgcaactcggggagaaggcaggatggctaacatcagaagggctgagaagctgatggagacatattgagagatccccacctgtccactgtaacacattctgagcaaactgttcttccctacacgtttgatactatagattggtcccgtggctagtataaaatcgagggtctgtggattgcaggatggcagacaaggatgagaatgtggatactgtaaagaatgaaaacaagggattaagcagccacatgcatcctgaatcttaaaaggaatcaccctgcaccccagccttctttccccatttggcaccaaacagatgggtgacccgattgttaatcttcagacaggaaattgggaaaatgttttcctgaaaatctgactagtgttcccttaggatcctgacatcaagggatcccaaaccaatagctccccaaattattctacagtaaacctaagagcaattccaacagcatgactctaattggtggattagtcttcatagagcagaaagccccaaatcaacagataattttttttaaagactctaacatagaagatagtggtcaaaatgaataaagagaggtggaagagaaactatacaggaaaaaaacaaatttttcgaagtgcgacttataagtgggacctataagcctctgtaagtgtagacagtggaacatattaacccagtgaaaagacttctgccagatattttgtacgaggctcatactgtagttgcaccaggcataccagcttgatgagtcttgggttactcaagccttactcatgagcttgcccgctgatttacccagaaagagattttgtaaactctcagggaactgaaaccagagctactgctcagtttattttctctgtggacatctcatgtaagtcgtagcaacattaccctatccttacacagccaggattgtgcttgctactcaggtacacaaactgaacagtaaattgtttagatacatgcacaggtgtacaaatttaaaatcaaataagcaagtaagtgaatgattatccgaaaagtcaggatagtgattatttccagaggaaggagggtgtattagattcctatgaccactattaaataaattaccacaaacttagtgacttcaagcaacatgagtgtattctcttatacttctagaattcaaggggtaaaatcaagatattggcagggctgtctttcttctggaggcattatgagagaatctgtttcctttttttttctagcttctagaggccttctgaattttttttggtttatggctcatcatgacaacctttggtttcctcatcatatctttcttttctgactctgattcctcccgcaccctcatatgaggatctttatgattactttgagcccacttggttaatccaacataatctccccatctcaaagttcttactttaaccacagccgcgaagtccctgttgccacctgaggtaacctattcacaggttctggggattaggatagagacatcattgaggtgtcattattctatcacagaaggggatgcaatctgggagagtcacttgggggtttttggtttaagataagctgcacaatggatggcaagtgtttattttgctttttatcattcaactgtacatatatattttatatacattcctgcaagtcacatgtttcacaaaaatgggctacacgtgttatatatatgggtcaagtttagctccttgtgtctagttagcaaatttaatctaggataatacttatgttgcaggtttacaacagtgagaaagatgatacagagattacttcctgcttttctctctgacacaactgtctttttttttttttttttgagacagagtttcactctgtcacccaggctggagtgcagtggcgcattatcacagctcactgcatcctcaacctctcacactcagatgatccccccacctcagcctcctgagtagctgggactacaggcatgcaccaccacagccaactaatttttgtagatatgggggtttcgctatgttgctcaggttggtctcaaacttctaggatcaagatatctgcctgcttcagcctcccaaagtgctggaattacaggcatgagccaccacgcctggcagtgatttcttcttaattacagcctaatttcctttggacttgaggctgtaagcaagagcaatgtgtttgtcttttagaatgaagtagggcagtagtattaacagtttcatgtaatggtcaattgatatatgtcattgtattaggctcttcttgtattgctataaagaaatacctgagactgggtaatttataaagaaaagaggtttaattagttcttggttctgcaggctgtataggaagcatggcacctgcatatgcttgccttctggggagtactcagggaggttttattcatgacaggaggtaaagcgggagcttgcatgtcacatggtgaaagcaggagggagagagacagagagagagagagagagagagagagagagtgagtggggtgtcagtcacacactttcaaacaaccatatcttgcaagaactcactcactatcccaaagacagcagcaagccatgagggatctgcccccatgattcaggcacctcccaccagaccccacctccaactctgtggattacatttcaacatgagatttggctggggacatatattcaaactatattagtcatcaaaatgataatttgaatttgattttgtttggtcttagaggagacattcttgaggctcatttgaaaaaaccaatatcccaggtcattctagactatctatcctttccatatgtttcaagaacttaacagactttatacaaaaagccgaatatggggtctaaggaatatttagttgcatggtatatgactaatttttcaccccatgggagacaaaagcgtattcttggtcagcctcttagcatttccagggatccatttttctttcctttcttccaaactaataaattctccaggaatgctgagaaaccttcaggcctaaagaatttagaaattgtggatggtatactggtaaaagcaatcaataaaaaactataacattagagtctacttgcaaaacaggaggagtagcaggcaatctcgacagtggaaatagcccaggtaaacttacattcaattgtaaattgttgaagtgagatactcaacatattgcatctgggaggtttcccctgagtgttgaatctcctcaagtgatcaaacccaaaatttctctggaaataaagtcagaaattgaatgattttgaaaaggaattttcttgcagtgtttgtcattttttcctagtctgggtaagtggcataaggtagagaaaatttagaaagaataaaatgttttcagttattacaagaatgaaaatatcaatattttaaaatatccaaacaagttgaaagattattgttgctgtcacaaattagagatgagcagctgggaaatattgattgtcaaattttcaagtttggtatcttttcaaatataaaataatgtgtttcctaggtggtagtttaaaccatccgagtacatggcttctttagaattaactttaaaggagttttctttattttggcctaagaggtgatactatcccaggcatcataaaagcatagcatttgaaatttacctttttaaaatgtagatagatttgaactagaaaataaagaatttgattgagatatgatttcatttggatattagcaagaaacatcagccagaatgctgtatttgcatagatctgatgccttaaattcaggctaacttatcctgttaccagcaaacaaaagtctctgacatacttgccctatgtgaaacaaatgccctgagctacttctttggctttgaactccattactgtgtggttctggtatcttaccttggttctgatctcatatttggtcctgctgtcatgtttggagctcaggagatctgatcttcttggtttgggacccaagtcacccctaacccatgaccataactagctgcaccttttaatggggagtgcttcaggcatctctacatctcacagtctaggcaaaactcactcctggtcatgaaaaggaagatattcccttaccttagcctaaaagtctcttttcaagtcttgatctcctgctctaggattgaaaagctgtcaacactgtagtaaggtctctgaatctcgtcaagataaaacactggtgcattccataaagtcaagtttgttgtcgtcgttgtcctattttggttttggttttcattttaacttgcactgaacatgggttatgatcagccaagtccaagctgaactactatgaagtttagcctagttctttttcagtgttttttatcagtcattcacagactcttgggaattacttaaaatctttattttctaaacaactcgcaagggaagagaataggtaaaaggaacagaaaagaatcaatgaatcaaatacttttagatggttttggattaaatatggtttagaactttctttactgctggatatttgagaatatataacatgctttgtgcctttgaatagccacattagttcaatcttgtttatagttttcctaatgtaaattttgaagcaggtgtgtgtgtgtgtttgtgtgtatgtgcatgtatttgtgtgtctctgtgtgtgtgtgtgtgtgacagaaaaagagagaaagagagagtatgaatgatatattgggaatttttgtttttaatagaaatctaatgtaaatgttagcccaagaatattgtaagtctttgcctgcaatctcaaaataacagtgacaaaatttcaatggattcagcaaattaaattactaaagaagaaaatctaaactgcttctcctgaagtagctcctgagcaactttcccagaataatgtatcaattttatgcatttgtctttgtgacaagtttgcctcattttaattattatacattaataatagtaataataatagttccaatgatacctgcaatttatgaagcattaaattatggatttagcactatgctttacatttatctcattttaatgagaaatataccaaggctaagttaagaatattgctcaacattgcgcaagtaataagtgctggaactcacatgtgaatgcaacactgcctatctccattggatctttcatacaacaaatcattgttgagaacatatatgtccaaggggtaaggtttttatcctagttaaacctcccatgaagatggtaagacaagttaaagtaactcagtgatgcccactctaaaaaagtgaagcagtaatgtttgagtaacataaggaagagtgagtcctataagctctgagggaatgtatttcaatagaggaatgcacaaatgcaaagacatgaggcaggggtgatactgatgagaactgaaagaagactgcaatgaaggaagactccagagaagtaggcaatgtatcatgcaatgcaggcagaagactagacagaggctagatcttaaagaaattggtatgccatgatgagaagattatgttttattttaaatgaaatggacatatattggagcagggaagtggcatgatatgattcacaatttaaaaatattttatctaatttagggactagatggtaagtgctggtggtgagggaagagacaaaagtggatgctaaagagaccatttagaaagctactacaaagatttaattctgattttcttaggtcagtataatatatcatgcaatccatatatgcaaatttcaatttttaatagcaaaatttaaaaagtaaaaaacaagggtgaaattaattttattaatatattttatttagctcaaaacacccaaaatattatcacttcaacatgcaatcaatatgtgaaagtactaaggatatgtgttacattctttcttgggtaccaaatttttgacatgtggtatgtatttgcccctataacacaatacaaactagccatttttcaagtgctcagcagctacacatggctagctttaatactggacagtacagatataggcaaatattaatgatggtttgattagagcgattgcaatggaaatggagagaagcagattaattggacataagttttatagatttagtaataataggagttgcagaggaatctaggatgaaacaacatttttagtaacactactcagagatggtggtgttattaagataataaaactggtgattttatggaagatgtttaaagaggaatcaaagtgccagtccataacaagtgaaaatactgcttctcattagtggtaactaatgtctctcaacccaccttcttgctaataccacttaacaaagaatatggtggttcacagcctcctgaattagaatgacgagaatgcatataaaactgcacattcccaaatgttactagagttccactgaattacaatatcagagtttccgaaactttaaatatacagtaatttaactgtggtgtggtgaagctagttcaacgtgacttgcacttgcaagagttgactgttacattttcaggaattttgagagtgtgttgatgtcatgtccatagcttgaaattgatcacagtgggagtatttacactatgaaaatgagcaaatgctacaaatcagggctttttttttacccccagagttcatttgtaagcacacacacaacagaagggacaagagaacaagaagagaatatgaagaaagcgctccacacacacacacacattaagcatgcataaaagccttgtaaaatacagcaataaaacaaaacagaacaatggtaaatcattgttagaaagataaatcttctggttccagaacagaagataaatttaaaagaatacaatgcatcaaagttgatacattcaagaactgaaattctaatactgagaaaagcatgcttgagactgtagctcccctcctgcatattaagaagtccctgcatacagcctagagtctaaaggaggtagctaaaatccttgtcagtgacaggatatggattaaataacttgtcttcatggggaaaatataatattgtatatgcagactaaaatctgcatataaaatgggcaatccttaagaatttcttaaaagcataactttgaaataagtagttaaggaaaaataatttataaaataataatctacaaaagtcaggaaaatagttttatactacataaaatgataaagatgtaaaattataagtataaatacaaacactaatgaaactatcaaaacaatttaatcaatcaagttctggtaataaagcagaggatggaaaaataaagtagaaaggtaatcacaatttcttggttgctcagtcaatagatactttctagaagatgagcttgaaagtaatattgcaaagtaatattggttgtaaataaactactatatgttggtacaaatgtaattgtgttttttaccattacttttacaccaacctaatagaatgaaaaatagcaagtaaaacttttgcacaatcaggttgtacagggcacacaacagagctaggaaaaaagaaattgtggtttttaccattacttttacatcaacctaataaaatgaaaaatagcaagtaaaatttttgcacagagtgtacaaagcacacaacagagctaggaaaaaagatatcatattgtaaaaggaagaaacaaaagaagcagcagcatgaaaaatataaagcataacataaattatgacttatactcttagaaattatcagtaatggtaaatatatatttatagataatgtataaaatgtgtatatataatgtataaaaatgtagcaaagaaagcaaaaaaagcacctcctaggctaaactctgtgctatagaactgtatacagactctactcctataccatgtaacagtgacagcaaaacagtgatttgacagaagtggaggacaggcaggatggggagagtaggcaggtggtagctgaaaataaaaatgtagaccaaggaacagtaaacaaatgaataattaaaggaaacaagaatttttactttaacataaacagctgaactcagaaggagagcatttaaaaaggcaatataggccaggcacagtggcttacacctataatcccagcactctgggaggccaaggcaggtatatcatgaggtcaggagtttgagaccagcctggccaagatggtgaaacctcatctctactaaaaatacaaaaattagccaggcacagttgtaggctcctgtaatcccagctacttgggaggctgaggctggagaatcacttgaacctgggaggcggagactgcggtgagccgagatcgtgccactgcactctagcctgcaagacagagcaagactccatctcaaaaaaaaaaaaaaaaaaaaaaaaaaggcaatataggtaacatgcaaattataacaatgaacatctaatagatacaattatctgtgcaccaataagaatgacacatttcttaaggcaaaaacaataggaaatttaagaagtagacaaaagcccaatagtagtagaattaaatttatctttcacatccctaacaaataaggcaaataaaaataactttgaaaattaaaaacattaaaagaaatgaataaaggagacctaattgtgtgtgtgtaggtgtgtatattttagcttcaattcagaaaaaaaggaataagactttacaagagtccatatgacatccacaattggcatacatgaagccataataaacctttaataagcttcaagaagacaggaacaggacagtacaacagaaaacgttttcttgtcaaagtaaaagatgatatggtaacagaagggaaaaaaacacaatgagaaaatatttaaaatctaaaattcgttaactaaaggtaaaaattaaattcaagatcatagaaaagtctaagtaataatgaaatgaaatgaatactaatgaaatttaaacaatagctattagaaattttgcaagattcagttaagagaagaattcacatatataaatgcttacattaatactaagtgaagaataagaataacaaagtaagcatcaaactcaagaagcaaaaaataacatatatctaaataaaattaaaaggaagaaatcccaaaacaaaagtgtcattcaagaatttgataatataaatagaaatgataataacagtaatagtagctcaaatcattacatacttaatctatgcaaggcattattctaaatgacttcaatgtgttaactcagtttgaatttatagtccctaacaatgaggatcaagaaaacaaaaagctgagtatttgactaaataaataaaatactagaaagattgattagaaaaaatggaaggcaaaaatataaacaaaataagtataaaaaaagaacaaaagtaccactggagaatttagaaaaaaattagaaagtatgtcaatagcatttgctggaaattttgaatctaagattaaacatatcctttctaagaaaaaaaaaaaatctgacttcccaaaattgacttgagaagacatggaacacctacaaatattaaaaaaaaattaatgaaatttaatcagttatcaaaaatgtctcctcactccctcagtaaaacatcctccacagctcagatgactttggagatgatctaaatactaatacacaaaatatcatgtgacaatcgtctctcaaaatcagttccagagaacaagagataaaagttattgattcattatgatcctgtacagctccatatcaaaaccaaatgaggataataaaataaactaaaagtataaattatcttttatgaaataatgtgaagatctaaaaaaattaccaaacttaatccacattaaactataaacacttaataggatttatactaggaatacaagtgtagaacctttttaaaaacatgaaattggtggcaacaccctggtgtgaaccaaagagaagttccttaatgtgaacaaatagaacttacggataaaatattcaataataacaataataatacatagtatatagttgttctttaaaaagtgacatttgtgtgtgagtggcaacaaaaatattaaaagaaaagaaacaacaacaacaaaagaagccacacacaaacacacatgtggggagggtagcttcaccttcgggtattggcaaggcctcctgtgataagtgttcacaacgacaatgacaacaacaacaataacaattgcctcttctgtgaagatatacacacacactctctcacaaaaaaatttacatacacatgaacaaattcatcaaagggacagttttgagagtccaggacagattcataaatataatgaaacatatagcaaaagtggccttacaaattagtgattacaaattagtaaggatgagttactgaatgaagtttactgggacaatttgcctatcaatattgaaaaaactcaataaagtcaagcaactcaataaagaataggcaaaatattataagtaattcacaaaagaagaaagctgaatggccaataagtataagagaaggccaggcacggcggctcatgcctgtaatcccagcactttggcaggccgaggcgggcagatcacgaggtcaggagatcgagaccatcctggctaacatggtgaaaccctgtctctactaaaaatacaaaaaattagccgggcgtggtagcaggcgcctgtagtcccagctaccggggaggctgagacaggagaatggcgtgaacctggaaggcggagcttgcagtgagctgagaccgcgccactgcactccagcctgggtgacagagcaagactccacctcaaaaaaaaaaaaaaaaaaaaaaaaaaaaacacagaaaatgctcacatactctaataattagaaagatacaaaatagcacaagatatcacttcacacttcttagactgaaaaataaaataaaaggtctagtaatacttattactggagatgatatgagggaaatcacagcactcacacaccattttgaggggaaaattagtgcattaactaaaagaacaatttgctcttttccctccaggaatcctctctcaaatgtcttttgacttaactcctcaggaatcatcttctaagacgttctcactcatctcccagatgatatttgcattataaagtccacctgcaacttttgtgcattttaacctctaccttcagccaggatggacatcaaaatgattttaaaatcaccacgaaatttcataatccatgaaaggatactcatttccttacattctattgcattaactgttttgcaattttgtggaaatctatttcagacttaagcatacatccaaggatcagttattgcacataaagcacagaccacctcagtggcaaactcactttggctggcaacgaaagcagatatgtaaaatgctgccttctccataggaataagggaatgagcgggaatcccccaaatcctctgcgcacataaggttcacttggtgcggctctttaacttctattttataactaacccacgtggaaagattttttccacattgaaatcaagatgggcgggattggttttgttttaactagttttccttcatatgtgagatttctagcatatagcctgagaagtcgggggcaatgaaatgcatatagtgtagaaaagggatataaaaatttcttgttttaaatttttttcccatgtctgtaaacactccatttcacctggcagaaaagttgttcatgaccgaaggctcctaggcaaaacaggtttggacccaaaggaaataaagagaactcttgtctttcctgtcatgcagagtgattttatatgcactaacccagtgactgagaagaggaagattctgtccctaaggtggcctgtcccggctggggcaggtgcaacttgcagggtaaatcccagaggacccagctatggccttcattctcagcagacactgcttttgcaatcactttttatctgtgaatccttgctggagaaataagaacagtctacagcttcctgtgtgatttgccacttctccttgtggacgacagtcatgtctgcaatatgcgctgattttatcaggagatgtatttaaaggctagtggttaatgctgtattaacatgtgatggggtaaaggaaatagggtgcaatttttctgccttagtcactctcccaggcataagatagagtaacacaggtgtgtctgatctccccagggggttgattatctcacaataaccacatcctctgtaattcgcttactactatttttttttcccaggatcagatacaaagaagtgatttaggtgattggattgactgacaaaaaactgtcagccagtctgcaccatgacattttaaaggataatatctactttctgcaggttcagccaccaataggctagtgtcagtgtcagcaaattaaaggcttcctggaccaactgggcttctgcaaaaacgtttatgtttacatttccaatgcccttttcataggcaattcaaaacctaaaacctaaaagttttcactactcttaagagaaataaagggcagggagttggcatcaatccccacctgagaaacacactattgtttgccagtgctttatgatggatttgagggaggtcagctgctattcctagattaatctagcgaatcaaatgcagtaacgatttctctcttacattctgactgagacagagaaaacctaagtccagaaggttgtaatcaagagataagtgacttaggggataatttcatatctgactctcagatacagtgattgtcaatatttcaatttcattgaattcaatttaagagatcacaataatgtttatctcatttggactgagcacttttggaagtctattcattagtataatgctcaatagtcttttggaaaacaaaattaaatagagaattatggagaaatgagtactaatttagctaaagattggtttccatctgatgtaagagggtgacatgaatgaacttctggttacagtcatccttaaatgcaaaagggtgaagttgtataatgcttccttgttcttttaggtggatacaaagtaccttacattttaaataaactgttgtcttctatataaatgctctatttttcttttgatttaatggtccctaatcattgagttcttgttttcatctttaaaacttaagggtctatgaatgttttggagacatattctgtaataaactttaagagtcaaggatgcattggtgaagcaaaatctctgctcacatcaattcaatatcttattctagtcagtcaagtgttagccttgggttcaaggtaggttgctgccttagcagtgggtaccagggcttttacgatggcaattctgtgcaacaccaaaatgtcatgactgcaaactcatttcctgggcactttcatggacaaatatataataacatggtacactggcacactgaagcaaagctttgcaacaagccaaccaagcactggtgaaatcaactaagttgaagcaattggaatgatgcaacaagggatgatcagaaccattttatattacatttattctaatctcattagattttctaatgggttcgtgttcagctgttctctaagaagatccttgcattctccatttttctcatatccatgtagaagttttcattcagatttctacatagagtaagaggccaataaatacttgttaatggacttcaacattctcccttttcctcaaaactcaaagttttgtttttgccctgatgagaaagaataacaatagcaacagcaataaatgttaaagatggataaaaataagaatgaagcctctcttctggttcaaaattcagccaaaaaacatactggacaaaaaagcaacctgactaggaaataacgtgaaaagctttaagagaaaacgggtccttgcaggtagcaattaaacacacacacacacacacacacacacacacacacacacacacacacagaggacatatttctctttgtattcacaggttaaaaagatgcaactgaaataggggtaatatttaagttgaactaactgttttgtatctaaacttgatgggtaggtgtcagtactgtttatggtgaaagaaacagaaaggtatacattcattttactacatgaacaggactgctaaatatggagaacatatttttgcaatgaatataaacaattttacagtttatctttctaatttcccagcaagtccagattattgatggtaaaaggactcaatgcaaatacatattaagttttcatttatttttccttcaatatacctgaacacctgaatgaaacatttcatgaatggaaagttaatctacccaagcttggatacctgaaacattaagaaactggacgcttttttggatttagtcaaccacacaggagtattgtgcaaaaggttaggatagggactcaatctcaaagctcagagcttgatccctcattgaaaaaatcaaggtgctttgcttttttattttttttctttttcatttgaatgggttcaaatcttcggcttactcaattttcacccagggcttaatgcactgggtaaccctcaggacataaaactttcaaagtgaaatgattctttctgctgacagatgttcttaatgacatgtgaaatgaggcttcatataagttctggtcctcagaaatgcatttggatgtggctggacttgtacacagcccaactgtctacgcagacaatcttattttttcatagaatatttggtcttagcacacaaagaggcttctcttatgacagggattttaaaattttgaatcctctttgtttttgtgggcaactccattcaaaaatccttacaaaaatttttaagacaccatagactagtttacagatactccttgaaggtaaaataagtaggtgagtttaaagttgaggttgatagcattcatgttgtcatatgccaaagtggtcagcaacaggatgtgcaactctatgacacctcactggacagtttaattcatgccttccattgatattgttatcttgattttttaatgttttgtattaaatattaggcagatgagatatcaaataatagttatagaatatacttagggtatagaaataccaatacaataatggctcactctcccacagaatcatttaagaagtagtacttacaatttttctccaacagtgaatttgatatgcatgtgaaatcttaaaaacaaataaaaatcatgctttattaagaaatgtaactaagaaaggatattgagttatacttttgctgagacacttgtaagactttaaaaataaacaatgattttgttttagcaaagcagtggtatcctatcaatatgcatttctgtcaacataaacagtatccaagaatcaggtacagcgaagatgttcctacaccagtaatcacaatcaagtcagaaattccttaatttttgtaataaatctgcaaacagaattttagctcatgactgtgctaattgttcattcttgtgaatctgaactacaaataatcaaacggtattcagacttaatctgtgttttacatgttccttatagttactctggatttttcacattggaacttttctataacctacattcttctctgcttaagtactttcctgaaatccattcttggtgtcatctatgtattagccggtaggtaaatatccagtacatgaaagtatgtctctttattttaactctttcctcttttggattctgagttaaacataaggaggaggaatagtttttcttggtgttaccacatcaatgtggttccatctaaattagccttgggctatgagggaggagacagtatggcatgactgtaaacgaaggaaaattaagcacagcatcctgtttactttcagttggaaagttgagtaaaacaacctgctaagccacagccttgtttttggatagattatgcatttcattagcaaaaaggtagtttttgaaagcaactttgtgaaaaaataatcactggacgtgaagaaaaaaaatggccattttagggaccattcctggaacaggcaaatctctgaatttattttaactaccaggacagggatatttcaaagacacagtctctgggtaccttggcaccaagactaaactgggcaagagttgtatcttaagttctttccttggggaacaacagccatgtgctacttctacagccattctttcaagagttctaaatatgagtaactctgcatattattgtgcctctataaacagcttggagttattacagatggcgacaaaatatttagtgggtttatgtggaaatttacagtggaaatcttataaaacatatgcaatctttttatgtagttgggactcttggcttgagaaactaaatgggacatttactttgcactttggccacctctgtaggggatgtggaatagacttaatccaacgagatactgaagaatcttgtgaaaaaacatcccaggaaaagaaagctgagggccattacatttgtttcaagatcaatttcagagtcaaagggaaagatcaattttatatatggtcttgactctatgggtttatatacggtaagagtaatttttaataaagtggtagtaaaaaatgaaaatactagtttgataaaatacctataagacatcgaaaaaccaaagcctcattgtattgtagctttaatacagaataaaggttaactgaaagttaagtgaatgtgccctgtattagatcacaaaatattcatggcagctaaagcagagataatgtttgaagtggaaaatcataagaagatatatctcttgggtagtgttgggtggtagaattactggaaattagggtacagagtaacaaacacatcattgatggagtcagagagagaaataagtgcaatagaagaaacatcatgacaagtagtggggaaaacctgtggttagttcacctgacatactccctgggtatttcctgaaagcattaggaggaagagttaagacaaacagagctaggtaagtatttctttgttactattcaacttgccctaattttacaaccttttccattgatgtgatctttgaaaatagatttaatatgtaatggtaagagaatgtctcttgacgtgtctgtgaaagacttgttgaaacatgaagagttgagccaatcagctgactacaaatgtgtcaagtattttaacttcattgataaatccttgagagagttgacaaaatgtagctgtcatattgccatgtgtggccaggttttattgaatttttatccttctaagtcaagtattgatgaataaaatcttatcatggattattttgctattcttaaattgttgagccagaaatattcatgattgtcttgcagtaaagtggcatgcatgtggaagaactgttaataacaattaataacatgttactattactacatgtaataacatgtagtgggacttcttgcatgggttacagagctaaactagatgacctatagcaacttttcccatcttggaattctacaagtgttataaaaatacttcaacccttacacaataacagactgacctcatgcatattcttcaatttccaggtaagatagtggaatcaaaacttgatcagaaatcagaacatttgatcccaatgctgggattcatgctactcactatatggtcttgaataaccaagaccatatattcccttttttgtgtctgactcatctatgaagttaaaaattaaaataaggagatgagtataattcatctttgaagaagttaaatatcatcacagtggcctacagaagttattttgaatcatgtatttaaataaaagcacttatgcatataatgattgttaatttcaactgccatcataattagcacagccacagaatcttagaggtggaagaaactctaaaattcataaagcacagtgatttccaaattctttactttgtcagacaaaccttaagtcaaaggaatcctatttagaaatccaatatttacacccagtatgagtggggttgctctcatctcagtaaaagtcagccagcgaagcatcccactcatgaatgcatcaaaaaacaatctgcttgttttcatcctaggtacatctaagatacctccattccctttgcagaatggctgagtttcacttgcttgtatcttctgttcttttatagataaaggagctgaagttcaaggaaattcttattcattcaatcaactcatgctgagagatacattgctcagaaaattgtccggttaattgacaacagagtaaatattggaacctagacatgttgactcactcagagctctgcacccctctccactccttcactgctacactgtacagtcgcgagaagacacagacataggaaaaacagaaagttttccgtcgtttgatggcatgggcaggagcagtggctcatgcttataatctaagcactttgggaagccaaggcaagcagatcagttcaggtcaagagttttagaccagcctggccaacatggtgaaaccctgtctctgcagaaaatacaaaaattagctgggtgtgctggcaggtccctgtagtcccaactacttgggaggctgaggcaggagaaccgcttgaaccctgtaagtggaggttgcagtgagctgagatcgtgccactgcactccagcttgggtgaaagagcaagactcatctcaaaaaaaaaaaaaatagtttcatagcatgaaaagttgctgggcatttattaaacacagaggctgcattcttttaccttcatgtaatattctatatctttgattttagaaaaagaagatctgtgactatgtttgacaaggaatcgttgtccatctaagcagattacgagaggactcaaataatctaacacattctgattcaccaagggaacccagctccttaaaacccgcctggatatgtttgggactcacataaaatttgaaaaaaagaaaagccctcttttcaaaaataaaaataagagcaaataaacttgctattcgtgtcttttaaaatctctaaaatgagacgtgctgaaaataattgtcagacctgtcttctgtgtgtaatccataacaagggacatgtccaagaaggttagtggttggactccctctgatttagagcatgctaacaaaagaagaacatttcaacaagtttttaatgcctaccatatgcccagttaaaatcaaactagaaatgagttggactgaataagcaatgggacaagatttctctatagctcttatttctccctaggaacattacccaggagaatgtgtgacttattttctatggtatcaagagccagtaagaagaaacagaaggcaccagtagggatagcataaaacaaaaacaaaacaaaacagcccttaatcttggcttaggagtccagaacaattatactttcacattttccttcctaatttgtattttctgttttcaagaaatttccagacagctacagagtggtgtaatgccaacatattttcaaaggtatttttgtaagtgctaataaatgagtgcatattgtaagaaaactcatgaaacatacaatttataaaaataaaacaagatcactgagagattaaacgaaattttttaaagtttccgtgcaaatacatatatacttttaaaaatccctggaattagcatgtttctcaaaggtgatgaaaaggtgacatgagatggaagaaatacctctaaacttagaattaggaggcctgtgatctagacaccacttctcggtcattaaccagatgagtgaatccagcaagtttcacaatctcttggatggcaatttccttttctaagaaaaaataaatttggactaaatgcactaaaggctttttccaggatgacatcctttgaggttgattgtttttgttactgttgttgttattgttgttaaaatgattaatatcatatggcataatatatattatgcatggataaaatgattagatataaattgctttcctgtgtgttgccatgatatgaacattgaaaccccatggacttaggtaagaaaggactttaaagctgagtaaacagaactttaatgagactctatgttagatcttccagaggccagtcagcacaaatcattgcattggattttcagttgagatgactgctgtgcaaattcatgacctttatcacatcaattgaaattcgcttccggtgccaggtgagagtaccacacagtcacccataaccctacttctagatttcagctactcctccaggaacccagaattatgaagttggcagctgctacaagctctgcagacaacgagaagggcatgtaacaatgccattcaaaagtggttcatgaacagtatggttctcaaaatgacacatatgagcatttgtgtatttgcaacagtattttttgctatatgtttgcctaattttgtactgatgaatcatctctttaggaatgaaatgactaaaaattctatgaagggttgggtgtcttttattttgggaaaagaatccaaaccctacggcaagagagccatgattactggaggtgcaggtggtattttgggggaaattagcataggtggaagccttaggatacttgctttccccttctacaagattcagcatggtgttgttcatgaaggtccagtgggtaactggaaatccccatatgcctaacactcagaaatattcttttggcttgttaggtaagagtgaagtcatatttaagaaatatcttagtatgagagtctagactatctcacttgtatcaaaactccatggaagaataactgtaaccccagatattaaccagattttcatagcactattacctacacacacagacacacaagtgtatgtatgcatggacatgtacccttaagatatgcctcaaataaaaggaaactaatgaaagatgatctgggtgtgccttcccaggtgttctggctgtgtgtcaaagctggtaactgttatccacccatctccagaattcccccagaatctggagtttcagacagatttgcattagaaagatgccttaattgttctgaggctgccatattctccctcagactattggatttaagatgaagaggttttgggaaggaagcatcaaagaatataccctggtgaataaaataagtcatcccaggacatttagaaagcacttagcttttataccaagactgatggcaggctgttacactgcctggcttgacgtcttctcctaacttattgggcttattttatgtccttcttgaaggatctcttagcattattttattttattgtatggatgcattatcaagaacaaattacgcctatacattctcattacctcaagattagaaagcatgtaatttataagaacaagctaaaacaagaaaatgactttattttgcatttttatatatttaaaaaattatgatgtagacacattttgtgacttaaaaataataatatatacacaaaatgtctcactcatgccctagccacctttctaaaatcttcaacattctcaccctataggaagccacatttattagtttctagtgtatccttatacttctttttagacaaggagaaggtaatacaaagatacgcttttatttcctggctcccttatacaaatggtaacatacattgcacactgcatgcttctgtttccatctaacaatatatcctggatatatacagcagaatgtacatcctgtttctttattccttcttatagccccggagaatgtgtggtacaatcttttattcagcctgttcccaatagatgcatctttgggtgggttctggttatttgtaattaaaatacacatatatttgggtaaacatataagataaattctcataagtagtattgctgggtcagagaagcacatgaatttttaacttaaataaataatactgatcagccccactggatagacagctataagtatttgggatacaagtataattcatatcccaaaatcttctgtgttagggattttggcaaaaaaaattcatatgatccatatgatataacttacacagggcttatcatcagaatcgttttggagggattttaaaacacagatttctggctcatccctggaggagctaaatctttcagtgtggagtggggctcaggaatctgtgtttctaactcttccaggtgattttgctcagggtggtttgaagatttgcttaagttttaggcattcagacttttgagataacagtctatatagtacaaaacaaaataaaatgagcaactttctgcaatgttatgatacatgatagatttagataagttagcttttgaaattattaactttgattttataattttcatattttggaaaaaatatttttcctactattgaatactgtaacaatgtcttcagtaaaaagtaaaatagattgtatagacctatcttttggggttcatgtaaatactaactttaattagttaacaatgtagaactgcaaaagtcataaaagaaatgtgatcataataatcacaaattattggtttcttgttaaatgaatctcaaagtccatgcgatatttatgacttaaagttactatgacaaatactagcttagcctttggattatttacattttaaccaagaaagaaagggttcttttttttttttttttgagaaattttctaagtatttattttaataaaacaaataactgactcaaagcttacaataagggcacctgaacatgtggtgagttcccatcccactcttataaagtattctggaatagaagagcaattgtccctgtatcaggattcttatttctggaaagcttaggaactttctgtcatttttcattgagagttgctgacactttaaatatcaacaaatggcagaccttgtcagagagcctactatgtgtaagatactcagacaatgagatctgactttgagaaagaatcaaattattatatttccttcatcatgttttcattcaagtatagcactgcataatagcaacacttggtctgaatgcagaaagccaggtaatctttccaagcaggcatgtggggatacactggatggaaacttttaaaattccataccgtttgttcaggcagaaccaatgattttaaaatgaacagtgacagatcaatttttaatggtaactctattatttttctctattatgaacactactttttaccagaccatgaaaattatgttgacatttgaaaagcatatgattaattgtagcagaacaaacattttgagtgctgcctccatttagggaggtgatagcgggcatgggccctgattataacatattggcacagtgtaacacttgccattttctttaatccactaaatgttaaagatcctaggtgtgccactgatgaattgatatacatttgaggcacgatgggttgtggagatgctattctgaaaacacaaccattcattaaactaaaatctaaatacatttcagaattaaaaccatgcagccaaacaactcttgattgcaacacagggcaaaatggccaaatgatatttacagcttgtaatttccagtatgttcctgattttactgaaagatgtgtgttcagccattacaaagcagttgctgtgtaggaaaactcacgtgagaaattttagttttaattcagcacaaccgtgccatctaaactttttgtttgtttgtttcatggagacagagaactgtggccataaagaatgagatatgttttcataatattaaatggtccagattagacagttgagaagagtcagctatgtaaagatatctcagattcgatacctaatccaaatgccccattttctttgatgttatcatgattttttaactggatgttttggggatacaatctatagcagtgaggcagagcacattgaaccgacccatgcaggaatcaaacttaaaattatattttattagtgacatgctcaaaccacccaaattaaataatcttggatacactaagtttgtaaagtccgcattctactctgttatttcagaagagaaaaaggaagactgggatgattatttgacggaaagggaaagctctaaaggaaaaaaaatcaagttagaacctggatcaagctcaacaccaaattaactggctagattaggaacactgtagcttctctgaggctgtcttttcaccagaatctaatgcatttacaatgatatcccacccccacccccaatgtaggctgtataattgcactgagtataaaagaagagagaatgattgagatagttcttcaacatggaagggaagccaagcacagtggtacagttttatgagagaaaaaaaatacagttatggataaaatatatctttttgtctataggtcccagatgaatgtatgtacatctttaggagtaaaaattttctataggataatgaaccacatatacaaggataagtcacctagtgcatgtaagttttggccttgtgtaatgacgtcaatatgtgctaattctaaaaggacatttaaaaaaattatttccattggtcattgatgattcacctttacctttctggttttcagatcctccatagatcaacaggggaaaggaaggaagcctggtgtgaaataggctggtttttctaggaagtgaactgctaggttaacataatctgcccaacaataggatttccagggaaaacaaagaaaaattatttctacttttacgtcttattacaaaaatcatactttatggccatgaatcattatttatacgttgttggcactacttttggtataaactgcttcattgttactcaagtggggatttacatattcctacttatctttttgtagggaatgagatttaaaatggtgagaactattgcagcacagtgactaaacatgaaaaaataaatggaatttagggagtcaagttattattaagattttatgtattatatatatgtatatattattaaagttttacatttcttgtgaacaactggaaagcaatgtaatgtgtttctgtaagaggcagctgaaatctggagagattaaatgaatctgtacttttgacatctgcccttgggttgtgtggcttttgatagttcatgccgacatagttttctttcattccctttgctttgaaaacttatatttgtcttttatgttttgcattcactacaatgtgtctgaatgtgtattagttttcagttacatttttgaagttgtggtttttgaatctgaggaacacatccaattctggaaaattctgaggcttttttttttttaacatggcttatggaggacttttttttttcccaatgtgtttcatcatatattagagttctttagtgggacttagatttttcccttcctctgtttttttttttattatactttaagttctagggtacatgtgcacaacatgcaggtttgttacatatgtatacacgtgccatgttggtttgctgcacccattaacttgtcatgcaaatcaaaaccctctttttttttcttcctgtctttttttctttctctttatactgagacttccgtgtggggttgctttgtaggaaaattgttctagaacaatttggggctcacttctgggacacaccacagtgatatcatcccagtggccactggccctgatagttttactgtaaattttctggatttggagttcttgaaatatgaaaatagtattaatgttaactttgaatttgtaaaatcctttacatttctgatggtggttccatcagaagattttttttttcagccagaggtctggcaaatatatacaagattctttgtgttgtaaattgttcccctaccaccaccttcttctgaggttgctgccctccaagggtcccaatattatgtagcgatttcaattttaatccactgcattatgcggtccctgaataggtatcctaacccaagttctgtgttgtcaggtgtggtaattgcctcctcaggcttctgaagaatcacatgcttatcacactggttttcagtttcctttcaatctctattttacaagtttagccaaaggaaaaaactaaaagcaattttgtcacatttatctggaattctggatgtttattagatagaatgaataagtacagtaggggatattttagatcattgcagtttgccgctttgtgcataccatgtgtgatttttatagcccaacatccctgcctttaactcagacaataaataatggtcctcctggatcaaaacctctctgaatccatcgtgaggaggaatacataccctcaagaacatttgacagcatacctgaagcaaactcttataatctgattagttgagtgtcagcaacctgtggttggtttagctactcccatgactagaggtaaagagttggaccaacgcaatgtagtctgttgtcttcccagtttgaactttcagaatgttgttatttttctcttcctataaggtcaggctgcatgttctgctcttttcccccatgcttttcacacatcctctccctggagaaatgtgagaggcagtctggaaaaacatcaatgttatgtatgtcagagcctgcttacacaggatgccaacagatggcaatattttatcattattacacaatccagagacccttcatctgtggcctcagggaacaagacgagtcggctctttggtgtgacacatgtcactgaagcttcaccccccattaactgtgctgttgtttgtgattgttaagctgcgtgtctcgccatgtgtcacattcttgacttgtacaagggcccattagtaagtagcatctgagtaccatgagtcatagaaggccccattcttggaaaaataaacactgcacattcagctgagattacagccactggctggtagtgatctggatggtgtttcatgtaaaaggctatttctgtgattcaccaaggccttttcccctctatcaatacaccagaaatgcccattgctgttgtatagcgcttcctgttgacaaacacaagctgagagctcacgaagtctctgggctaggtaggatttggttcatgacaatggaagaagagggaactaggagtaaacacaagccagatatttcaaaactattagaaagctttatgaaatcaacttcataatttcaaataaaagatgtattttgtttttagatatattttccagagacttgctccttatttccctgtcatttccttctgcccctcattctattttgcaaacaactgtctgttccttgttcttatatctttcatgactcctctcttttctctcctctcttcaccactcttttagtctttccacatcatcccctcttcaggctccctttgtcttcccagttttcatctccagaccatgattcgtagaactccagctcaggaatggcattctggtacttcggagttggcaccaaaagacaagacagtcttgccaacaccacctacccaagcaactgaatttagaaagagaattccctgcagccacctctaacctaagcattgtcaacattataattgtaagtcgtctaatggttaaaaactggcctgagactaaagaaagtcaggaagataaatgttccaggttgggttttgggaaagttttggggtttctgagtctatgcagcttttgagtctgtatttcattccttgatccccctcagcaatctggctcattctctgtttgtgtttctcttttatgtttttttttttttttttttttttttttaagaagtgagattctggcatttcttccaggaaggaaggagcaggagagctttaggcactgctgggaggcatgaagatgaagctgcatgaacatcttcacagaccatctaccccactcaacgtagggtcatgaccatgtagtcaaacaaccaagggtcagaggggagaaaacagatggagaccaaaggcttgcagaatccacaccttctttcaaaacctgtctcagaaaacggttttctgtgaacgtagatttctgagggtagtgcttctataaacactccactcatttctctggcctaggagaagtgttttgtatggcagcctttgccatcaaacaaggttttattaaatatcccccttgttgttgttataataatccatgctgatataaaccatgcttcataaaatgccacaatacacattcactgggcagcaccccagggcagcctccaagcgaggctcctcgggccataaaaccgagaccgccagaaacagggctgccatttatttccccgtaatgttctttctttctctctctctctctaggcagattttcctcgtgttgaaagggaacctctggtcaaaagtcagcaagcaaagttgtagaaagctttgatagtcagtgaagtgaatcatggctacacatggcagtggcatgcaccaatggagcctcttgctgggcggacctccctctaagagcaacttctggtcatcagtcaaaggggcccccaacgcgctgtgcacagccaatggtttcaccagctccacggtgccggggtcccaagttgcccttttccataggtattgctaaagcaaatagcagacgctatttactgggtgtgatgctttcaatcacattaatctagccagtaaaaaaatttatgaccaataaaaattccaccatgacatggctgattggaagggaggcagcgggatgaaaatccaagccacgcctctgcctctagctagactgtcacaaaccctggaaggaagtaggagtcggggaagagaaagacagaaaaatctctggggttgttaaaactaactcaagggtaggtggataaaactcttaaatcgttttactaagtccaaacaccggaggtgattgaccgaacacctactttgaaaagctacctgggcgctgatagatgtagcttttgcttccactagaaaatcgccctgggtttcttctagtcctagtatcacgtaggtgtttgctcataagaagataaatatttttaaatcccattaatttatacaagcactagaacgatgcctgggtggggactcctgtctcggatttgaagccagcaaagaatgtagcttcacgtagctgtctctctcctggttggcttgtacgtggtttatacagatccacaagggcagtgactaagctctgttaagacttgtgactcattccttcttttccccatccatggcgaccgtcctcagactgcatgactctcaagcacacactctccttaccttccatggcttctcccttgagtgggcagctgatccaattatttgttaatgatcccagaccacacacagcaatgaggatgttattttaatgaatttatattggaagtcctgccactgggagtgagtacctgattagctaattgtggttaatacttcaagtagcttatccaatatccattatcccattctttctaagtaatagaaccccaaatttaatccacgtggcaatgtgcccagccagaagactttatttgcaaactttcttattgctaagagtggctggtaagatgtaatttgaaatttgtatgtgggatttttgagaaagactcctaaaagagggaaagatagtcaccttctcaaactttcttctatttcctgcctagagggatgacccaatggctagaactcctacaatccccttggagtgtgaggtgtgaaatgagcataaggatggaagcctcactctataaagatgaaagagcagaaagatcaaatgggagaagccatgcttctgttgcttctctcatacaatgtgatctctagtctacctactgctagactgcttttgttttagaaggaaaaagaagcttctgttgtttaagccactacgatgtcaagtctcagcactagattcctaatcagaatcaaaaccatggagagatctaaaagttctctccagaagccattttttacaccccccaaactcaacaaatgagtactcaaatcttccaaacagaatgacaatctcactttaaatttttttttttctgatgataggcaatttcctccaaagagcagcactttacacacatgtaaagatatgctttacatgtaagacatgctttaaaatgtttgctgaatgggagtgctaaacataactggagtgctaaactgatcacgggttttacaaccgggaagatcaagcttttgaatctgaaatatctctcgcttactagcaacgcaacattagacaacttacgtaaacttgatcctcaatgtctgtgactataaaatgagttaacaatatcagcctggtaaaggtattgacaagatgacaaagcttatatttaaagtagatgtaacgtagaggatgcttaaattccattcttttctgccttccacttcttagttagaaattctatactttgaatttattggcttttgttctcttaattcctccataaaaagaagtataaaaattctgtcataagcattttgcccaccattttattgactcattcctgtgtccccagttgtatatgaccactttttctccagtgttttcctttctgtctcacaagtaaatggagacatcagcatataaaaaataaaaagcaggccaggcatggtggctcactcctgtaatctcagcgctctgggaggccaagatgggtgatcacctgaggtcaggagttcaagaccagcatggcaaacatggtgaaaccctgtctctactaaaaatacaaaaattagccaggtgtggtggtgggcacctgtaatcctggctacttgggaggctgaggcaggagaatcgcttgaacctgggagccggaggctgcagtgagccaagatcacaccattgcactccagcctgggtgacaagagcgaaactctgtccaaaaaaaaaaaaaaaattaaaaagcaaaacaaattaaacatatgcccagcctgcactcactacctatatatttattattatatttattatatgttatttaataaaaggacaggccaaagtttaagccagaataattaatttcacagattttccttccacaactattttctgagttaaggcctggcatccattaaggccaagtacatgatagtctctgctgattttgatggtagtgtcacactacccagaaacgatcaagtgttcatagggatgtctctgaaatcacaagccattgctaaattaagcaacactatattattactcacatgtaaagagcacaattcagcacttagtggcgaagggtgaaaatgtggtttcagatagacacatatgcacacgttcccatggacaaatgaattgacttctcttaactgattaattaagaatagatacctcatggggttgttgtgaaaattaagtgagtcaaggtatgtagagaacataggatgatggctgacatatagtgatcatcccaaaattggtctttatcaccttcatcttcatcctcagttagggcttatcactaatatgagctttagaacttttatctattcctatccctgctcccccaacacccaataggagtttattttcaggacttaaaaacttcatgaaagtcctttgcttcttgcctttctggcaacttcaaaattatttcttttagaaaaaggtaggataatgaggcaatgaattaggggtcaccaaaaatttgtgttaaatctctttaaatgagaatttgtgaaacaccattttgatacagtttggtattattttgtaaaggggtaaattattttagtaaacacagtcgaatttgaaacctaatgccaccagccacgaggtgatcttgatttgagccagttaattaacttttctgaatgcctgcctctcatgtttttggaaaattgcatgaacttatatatgtaaattacctagggaagaggccataacattgcagccacacaagaggcatttgctctttctctagtaatgtatttattttcctgttcactagtaaggtttttgtccctatcaggaaaagttaaagggtcttcctggtgagtcaatcaggaatctggtgtattatgaaggaagggacggcgagaaggaaagcagccaagaggcattgaaaacataaacagtgaagtattctactttgtttatactaccttgccagtcctcatgttagttccagcctggcaccttgctgctgtctggaggtactacttgaaaaaccacacccaggcctgggatcccatcacaaaccaccacctcttacaataacagtccccttagtctttgtatttctcaaacctctgacatagaaaataatctgggacaacgccccaaattaacctaagtagtctataataaagattttctaaccacacccaggcctgggatgccatcacaaacaaccgcctcttacaataacagtccccttagtctttgtatttctcaaacctctgacatagaaaataatctgggacaatgctccaaattaacctaagtagtctataataaagattttcaaccctgtgatttgggacatttggaatcaagatcccctacctccatgacattacaccccaggtaattttgcaaatacttaaatgttatttttcagagcaataagctacatatttaggaaatttccttttgttttttttttaagtagagtataaaaggatgtcaacccagtcttcatggaaagaaatttctaactaagacaaagaaatggtacacaaatttacagtggcctgttcacaaccttcacactcagacatcatgaagaaaggaggggctctgattggtgcacgtgctttcaactcttcatctgacctagaaacccaaaaggcatttatgagcttgatattaagtcttttctttggagccttgacatcacttaatgggtgttgcatagaattgactggccattaagcaactgagaaaattccctaaactcatttctagatgaagtctttagattcaaatgctcattagtacttaagacaattgccttattctcactgctcaagaatgttgaatcaactctgattattgagtgatgatagaggtggtctatataattctcagaaaaggaacactggcttttttgtttctgtttcttgttttgttttgttttgttttctctggcatagctttagccagttctttttcctccacattttcaatgtagctagaaacatcatgcaaaaaaaaactttggtattgctaagtcagcatgagagtctcttggaagttgccattcctcaaagccaattctgtgctattcaagagacaaaaagtgaaaaattccgggagacgatgatctctcctatggtgaaaaatctaaaagacagatggccatgctattagaaagcagataacaaaaattattttgactagaaaggcttggtaagccccaaatggggattgcaacttacctgaggttccccatcaccaccgcacttgcagttcattctctatgaacctctccaaatccaacggaaagcaaaacatcaaccaggttgccaggctttacatggtttgggggtacaaatgaccacacattacatggtttccatctgaaatcatagcttggtcggcatgcactgaaagctttgcaaacctcagtgaaactctagactgccctggctttgatattgggttggctgcaggggtttcccacagctgtggtagtgatacccaagtgaatattttcatcctctaagcaggtcctagctggccagtactttcagaagtagaaatggaggacacacgggcacacacaaacacacaaaggtgcaggagagaaagagatgaaagttgtgagataatagaaattgtattttgattcctaaaaatatgattttcatttacagaagtacaaaaatctgaaaatttggatgaacactaactcattgctctaaaataccaatattataagtgctctgggattttctgtaaaaaaaaaaaaaaaaaaaaaaaaaaatagcagttgcctttgccatagtctgggtttgtaaccatacatgggcctgagtgccagtgagttgagctgagggttatttgccatgaaaaattagacacaggggaaaagaccctggcacttcctttactattggataacaattaatcttccaaaatgctgacttctgtgtaggcaacatggtggtatgtgccagggaatggatttggtttggagaagcttcactgctccccaaaaggctatgccaggactgtgcctacaatctctctttattctcattagtattaaagcaaagatctctgttaatataaagaaacaaggccaaagggaagaataaaatggagggtaagagagcaagtgttctccatgcttttgacctgtaccattaaaagtattgaataagctcctgctttagctctgagtctgtatcgtgtttataataacaagcagacattatctttactcttaaaaggtatcagggtattttctcatatttttatggcagtcttttctaaagcagaaggctatggaaagtgttgatcacaaaaaaatacacggatggtttagttgccagataaatacaggtgtcctgtatttgtgtttgctgaatctggcaacccaaggtaagaagtcattttggagttaggagatatttggggaagcaattggaaagagaagcattgactgaattgggactcagtcaattggactaagtcccaaagttttttgtttgttttaacatgtatataatccttgcttcttccatattcttcatcaccctcttgggcccatagtagactccctgaaaatgctaattgattgactcatttctagataaaagggaaagaccaagactaagccaaagtaaataaggtttctagtttgaatgttttatttcatggaccagatctgggcatacatttaccatttggaacacatgcttttgaaatcgcaaaatataatgcattttaaaactcatataccttttaaagtcccaccctgccaactctcaggttattattcataattatatcttaatggattccacaaatcaatttttttgtttttcttggttaatattgctgatacttacaaatgagtatcatttacctccttcccctcatccccccgacacctccatagcctcttatggagccaaagcccaaagctataaatatagaacaccactgttaggagttccccttccctctctttttcaccccccagcatgtaatggacttctcttttcacagtgttaaaaggatcagtaaatcattgggtcacctactgatatgaaggtctttcatttgaaatcattagttttagcaaattgcaaaagaaaaatacaaaagagcaaataaatcaaggaaaaattacaacaggtttttactaagtatgggtggagtggaaaaagtgatcttggcttaattacccactcttagtcataagacgcaggaagcagaggttttaaaaagtccaattggggctgtgttatatatatatatatatatatatatagaatatatatatatatatgtgcacacacacacgcacacacacacacacacgcatatattttaaggtgttaatttccatcacatcactctgtgctgggttaccatgtaaaaaactgccgaatcttgaccttcacgtgaaatgttaaaatcacactctctcttggaagactaaactgtcatgaaatattcttttctgcaaagtcatggaggagtatctctgtacaggtaacagacacttgagatctgggtgtatattgcctgaagaaagaaagggcgtgtttatctgataagtgtggattttctttatatcagtatcatctcctttttgcttctgtttgttgactcacaccattacctaagctttaaatgccctaatccctacaatctccattccttttatggctcaagtcaatctttctacctattataccactaaatttctctttccctaattaaacaggtacagcacttatagtcaatactatacacttggttatacactttaacacttgattatttaatcccttgcattattttaccttttcttatgcatgcatcttttcctcaaaattactgaatatacccggaggacttagacttctgtgggttttttgctatcagtaatcaaccatgcagaatataacatacttgcagaacaatgccaacatatatttcttagcaaacagtgttattatatcaatcaacttattttaaggaaagcaattcacacattagaatggagagagaaaaagtctaagaggttaaagagggatgagcaacgtgtcaatcaggcttctctagagaaacagaactaatatgtatacagtatatgtttgcatgtgtgtctctctgtgtgtgtatctgtatatataaagagatttatttctaaagaaatggcttgcaccattgtaggggatgaaaagtcaaaaatctgtagcgtaggttggcaggctagaaactaagatcagctttgatgttgcagccttgagtctgaaatcaatagggcagctcagcaggctggaaagtcaggcaagatttctggtattgtctggaaagcaaaactgtttctccaggatttctcagttttgttctgaaaccttcaaatgattagatgagacccagccacattatcaagggtcattttctttactgagtcaactgattgcaaatgttaatcacatctacataacaccttcacagaaacatctgaactaatgtctgagtaaacaactaggcaccacagtctagccaaattgacacagaaaattaacgatcacaggcactttatcatttgctcagatacagctactggtgcactgtatccataaccccaaagccaagtctctgtttccttgcagaaggctgttaattaataatatcagttgatgcatgtgatcaccatgacaacttttttttttcctttaaatattcttgttaggttaattgtgaataattttcaagtcatatatccttgtttagagagcatgttggcatctaactgggccaggaaggagagcaatagaacccagaaagcactctttaaaaatggagagaatagatcgtcattacggaacaagcatatgctaaatattcaggctacaatgccactgaattgatgtttttttgtttgtttgtttttccctgtgtggttccttctccatttgaggagacatgcaggaaaaacaacaacaacaacaacaaaatacaaaacaacaaaaggccgtcattccagatcgacagacagaatttagctggaattactttggtatacacgcaaagcctcatggtttaagcacctgatggccatgatgatgtgttgtcatccttggatctctaaacactagcacattgccattggctgcagggtaaactaaagacacatgtggtgaggtggggagacttaaaataaatttgtggggaaatggggttagttcagctgctccacagtgtccacaccttctgggagcttgttagaaatgcagatgctcaggtaccactccagacctactgtagccaaatccgcattttaataagtcctcaggtgattgacatgcccgttaaaaattaagaatgaattaaatcatccacggtaccatctgagacaagaagaagttatggcaccatttctccctttcagtcttctggggcattttctgtctccaaaatcaaaactgagttggagtagctcagctgtactctatttgatcatcaatagtggatataaaagactaatagtgtttaaacagtgtctaaacagtgttccaccctattgatatcctcccgcctcttcttttattcccctttccacaggcaaatggagaggacccaaagggaattcaagtttcttaagattcagaccagtttcctgaccaaggtgtgtgtgtgcgtgtgcgagtgcatgtgtgtgtatgtgtgtacttaaatcagagtcactgttaaatcagctaagtctcggggaagactcagctagaatgaagatttgtgaatacaatacatttgcaccctattattttaagcattgaagaaaattcctggaatgagaatgagatgtggctaatgcagagtgaatttggtgaatctgctagccataagtatccaaaataagctcagcaagacttatggttgccacttcaggcagttggcaactgtaagccacaggcaaagaggaaggaaacagagaatgaggaacaaaagaataagatatgagtaaagtagaaaaataaaggtaaaataaaagaataaaatcagaggcagtctcattttgcataatatttgtctaatatataaagagaaaattatatatatgtgtttatatgtgtacgtgtatgtgtatatattagtatatatattatatatgtatatgatatataaaatataaatataaagattatatattattatatataatattatatatatttattatatttttatatatttatattatatataaaatataaatattgagcattgactttggatgatttagttgacatgataaataaacataaataagtttaacttttatagtctgacatggtatcttttctcccaggggtttctgggcatatctcagcaagaacaaaatactgagagttgtttctctgtctttgcattgaaaatagtcactttaaaatttttccttgtagattctggatattagacctttgtcagatgggtagattgcaaaaatgttctcccattctgtaggttgcctgttcactttgatgatagtttattttgctgtgcagaatgcccatcaataatagactggattaaaaacatgtggtacacatacaccatggaatactatgcagccataaaaaatgagatcatgtcctttgcagggacatggatgaagctggaagccatcattctcagcagattaacacaggaacagaaaaccaaacaccgcgtgttctccctcataagtgggagttgaacaataagaacacatggacacaaggaggggaacatcacacaccagggcctgttgggaggtggggggcaagggaagggagagcattaggacaaatagttaatgcatacaggacttaaaacctggacgacaggttgataggtgcagcaaaccaccatggaacatgtatacctatgtaacaaacctgcacattctgcacatgtatcctggaacttaaagtaaaatttaaacaatttaaaaataaattttctatgtaaaaaaatgtatttctagttcaaatacttaaggcccttatttaaaaatacgttctgtcaccttcttatatgatgtgtaagactctcaacaaaggccagaccagtagaaaaattgtgaaaatccactgcattaacttataacaatttaaatcaaaatctgctattgaaaataaaaccaaagaatcagtcaaagcacagttaatacttgagaggatttataatgctcatagttacatgaaaaaaataatgtagtctactgattacaaataccttcctattcaaatcctacaaaactgagggtcgcagatatagttgcagtaacaaggatgttactttttctgtttccaatttttttttttaaatatgactttaatcacacatttcaagtttttaaaaaatgttcaactgattttacaactacggtctatgaaatacaggttctgaacaatctatactataattacatactatggagagagtttatatgattgtattttgtgtttcaaatacaaatgtgttatatactgcatacaattccactgttaaaaaatcaaatgtgaagagttttgaagatgagaacagctggaagaaaagtacaattttaggtaaataagacaataggaattgaccatctggatttgttaaagaaaattgtatttcgaaagaacagatgaaagataaaaaaggctaagacaaaacccccaaatctgagtatttaaaaaattataatatcagaaaagattgaactgaaaaatttcaactagaagtagaaaatgaaatcaatcaatagtctttttgatgttaatggtgtgttgttatttttagttaaccatttatttaatgtaatttatttcaaacagagtaactatataagggtgctactttttcaaaaaatgaggaataacctgtcaaagtgttatagtccctttatagtggaaaaagacaaacaggcaattcaaatatgtagagaaattcaattttatgaaaaatgagtatcatacataaggttgtgaaaggtaagggcagttagagccaaaagaaaaacaacttgtcaattaaaaattaaatatccacttcagtagaaaatacaggattctttctattgtgtattcagtatctcgggaagatgtcctctacatttttttttctttctatacccatagaaataatctattaagcccaagtgagttattccgttttcctttctttcaatgtatttcaatataattttttcaagatttaatgaaagagctgtacccagcccttttcaagaacgtctggccaaatgcagcagtaaattataaaataatgcccagcattcataaaacagttcgcaaattactattacaaaaatccactgatcaaatgagccccccagatgtgttgtttaaatcaccaaatatatatagatatatccttaagaagcatattccagcttctcaaaactgtttaggattttccttaaaaatatctcctttaagtcagatggtagcagtatccatattctgaaaaattattgccaaattaaagaacaaattattaaatgcaggcactccaaacccaaaccagagaatgtttttatttagtatttttgggcctttctttcagaggctcttacattctggtttccccagaatagtccccatttgtgcctgatgtaactgttaatagtactgcctttcactctccaagggtcttagtttggataataaaatatatggttacccacctttaagcaacgtatgaggtataggttaagaattcatgaagtttagtcttttatttttataaaccaataacgtactgagtgaactattaaatattattaaatttggtatagggtattcattcatgtgtgtgtgtgtgtgcacgtgtgtatacagacacacataggtatcaaatctatagcttgtgaaataactatgcttaaataagaagtaatgaagtttattctgccataatcctgctgctactcacagatagatttcttcaaagaagttattttgagactatacacgtactccaaaaatgccatttctagcacaactctaagtgtgctagagttagacttgtgaaccacgttataagactttcaaaaaaaagtttcattgcttgatagccacaattattttcagtcggaattaccagactcaacatcaattttaaattcaaatggcctttatttggtttaagaaaacatagccttgaggcacatacgtctttatttattatgttgaaacataattatttgtttactgtttgttccttctttgagctccgtgagtacttacgggcaacttttccttattcatcagtatgtctctaaatatctagtatagtacttaggacgttttagacacatagtaaatatttgttgaatcataatataagcaaatgaatcagtgagtactgatctttgagtctttgcagacaattccgaaagtagagttttcacactggaataaatagtcggtaattgttttgaagggaacaatactaatatgtaaatcctggtgtaataaattttaagtcatattgacactcaagcttaataaatccacatcttatcccgaacaactacacctttttttcagaaatgatttcagttttgtgctagaaatgggctaaaagtggggagcccagggttgggctgcctgttcgctactcaaaagttgatccacagaatgagccacatcaatgtgacctgcaagcttgttagaaacaggccccactgcagaactatggaatccaaatccacatattactaagatcccctggtaatttatgcgcacagaacatttgagaagcactacttacactgtttatggtttgagtgtttataatattcatgtaaagagactacgaaggacacagaatgaagttaggaaggggtatattaagagatataaataccacaaaatgacttttttgtcccctggggattgtatgttctagtgagataaacagataagttttgtctgttttaatctgtctgctaaggtttgatttaaaccattaaaccttagcaggcagaataaaatagagtaaaattataactctatacaaaataaagttagggttaggagaagataaaaccaacaactctctaccttgaacaaagacaaagagattaaagtgaagtatcaatcgttgcttttgtgttcactaatacctacgcatttgtgtgtaccttctctctcacacacacatacacccatacacttctgtctcctgccttcctacaagagttgatatgactaaaatatgtatcatggctatcctcccggtagttatgtttttccttataatgtagtgaagctttaacttcaatgccctcattagtaacctgaacatcttaagactatccatagggaaataaatcttaaatgaaaataactgcttttgacatgcattgaccttgttaacattgcaggtaaaacctcaccaaaaaaataaacgtcatgttaccaatgcaagattcgacacacgaaacacagaccatgatgaggttcagctgtggctctttcttgtggagatgtaataactaagagtgttgctgcacaaccgatgcacagaaaaacaagcttatcaggatgcctcttggataccacaatgagaatacagaatcccccaggcctagagttttcaaattaatcaacagataacatttcattgacaaaatagtcatactttctctggttgtacttagaaacactgtctaaaatttattttagtctaccagactggttaccccaaagtctatacaattttaacagtaacatctgattgtagccttatttaaaatcatgtatgctgagaaaactccattgaaccatttgcaaagatattgatcctaaaatatgcttatttcacattgcatgcctgtatcaaaacatctcatgtaccccaaaaatatatacacctactatgtacccattaaaaattctaaaagataatttaaattttttaaaaaatttttgaaccagacaaatcttgcatatagactttgttataacatgtaacttatatatttcatatgactgcagaaaaaaaattcaataaacacttagtctctgttaccatactacatgaaaggttctgcactgtgtatttgaaatcaactgtgacatctctcctggaagattttcctggactcccgttcccaggaagagtcaataatcctatcttgcgtgttaccaccttgtttctgtatgagtaatacaactaagctaagcctacattgtaaaaataatttccatatatgcttctgacaaccactatattatgaatttggcttattaaaaaacaagcatttggcttatttttgttctttagattttagtacacttttctgcatcaaaagtgctcagaaatttcaactgaattattaatgatttgttggacatattttaacacaaggcaattggctattgtgatatttcatttaaaaattctgggctagtcttcactacgcttctcaggaatgaaaaaggtagagtcaaaattagcagtagaagttcacacataggaaaatactagatttgtgtttctcatcttgacaagtctgtgtaataataagtgtcatttatgacccatgcaggtatgtttttttttgttgttgtttttttttttttttttttttactttacaaagtttagtcttcctcttaaaataaacctgactcttctgatggtagctaaatagcagtttcttccaacttccgtgttggaatgtcaaatgtttcataagcattcgaaaccactctctgtaagaatagtacagtagagttatataccgagcatcttgccatgatactaaactcccagaacaagatgtgcacgatactaaagtacttgcaaatgaaatcacaagttgactggaattagcttcaacatgcttcagcaaaaacaaatttgaaatatcatcgaaacaccgtttttattcaaaacactttcacattattttgctgaagtctttcttagaaatttcaagataaatacagaagatagtgcccaatttacgatagttcaacttttgatttttcgacttttcaatagttctatttttcactttcattatcgtattcaatagattacatgagatattcaacacttaactataaaatagactttatgttagttattttgcccaactgcaggctaattctgagaaggtttaaggtaggctaggctgagctatggtgtttggtaggttaggtgtattagatgcatttttggcttatgatattttcaacttacgatgggtttattggaacagaaccccttcttaagtcgaggaccatctgggcaagactcctcaggcctatcttcatggcagtaaatatttagatgagtctgtgcattggacactgtttgatgatgtgttatcttttcagttattattgacatcaacttttagtccaatgacccaatatgagtattcacaccttaaccaataatgtcaaacatatataaacacatataagaagatgtaagagtctcttctgcaatgcagaataaaggtgatggaggtttctacctttgttttcttgtccccgttccttcactacataagtccctgtgtaaataatgctataaatatactttatgaagaaattaatccatgtgctttgaacatttgtgtcagatttggcaaggaggaaatgctcttcagaagagtcaattattcctacctgaaccacaccttgaatttgccatggaaggctggctttcactgtctggctgcacatttctaattacaagaaattagaaatttattgcttttcctcctactacttatgaagttgattttaattttgcttgtttttaaacagtatatacttcttacttataaatacaaataggtagtctaggcatagactagacaaacttatacatggattaaccagcaatgaaacagcatacctgtggttatatttccacatgaccatttctcaaatgaagtctccctttttctctaaatgtctttaaagatttgagtgtgcataattcatacctaatttatttaataatgggagatgcagagttttaatacatacataaatacattagtctaaaaataaagccagcaaacttgtttaaacattattttaaaatattggcttcctctcaatgaatgtcaattccaaaatggctttattatccagaaactatgtgttattgctaaatcttactccaaaccaaattattttatgaatggatgaaaaagttataaaacacagacctttaccaatatttgctaaaggatacataataccttctaccataagaacaccaaagagagcaccagtaagttgtttgagaaaatctgttccctggaatagtggatgtttctttggatcaagtggacaaatagacacaatgtactcacagcctatcccaataagaagcattagaatattttcgtgacaacaagcaaaagttattactaacactgattttacttttggcatcaagacctggtctctacgtgatacagttctgtgctttaaaaaacttacatggcttattatcctttttttgttcttttgtagaactaacagactcagattatccaacagcaaatcattttccaaatgttaattgcattctttcaagaaagtggaatgttcctgaatgtaatgtaattgtattttttcagccactccaactaaagcaatggcttacttaggttggcacctgtgagaccaaatttttttttttttttacttaagtgaattagcaattacggatcaggaaagaactattaggaccaactgagacctgatgcctaggtgatgttttcccaggttaggtcttatgtgggccaatggaaagaaactaaattatatctacctttagccacccccaaccctcagccctcacttattttatgaaggtaattagtactttcagtaattggacctcacacgctctatagatggctgaagtcacaagttatgggtattgctgcagaatagcttagagccttaatggtgaaatattcccctgacaagaattatcaaattcaattgaatacttgagtttctgacctaaaatatttttccagaggacaagggagcccagtggttgaagttttttaaaggctgtcttccagggcatgaagtagggaggagaagaatgaccagtttatagggaaagagaaacagaaaatagccaccatacgccatgacactcttatctactatgaaccggattgagtgttcaaactttcccgagttacagtcagtcctaaactcttctacagggatcactgtagacttgccctggcttgtcttacagaaaaatattcccacagacagaatgactgggagggttcaacggcaggttacagacttttagtcagccggaaactgacagttgtcatattagatgggtaaacatggctgatctgattttaggttttttttaaaaaataataactacactgatgcaaatcttctttggttgctttttctctgttttctctcatttgtttatttatttctacctacggtaatattttaatcatctagaaaataatgcaataatcatattttactcactaccaagattttataaacattaacctttctgccgtatttgtttcagctatctcaaaaacatttttaaatatttttaaatgctgtggagcaccagaattcttcttagaatcatctcctctcaatagagtagaccctcatttctaggcaattgtgcttatttaggttgtgcatatatatatatatatatatatatatatatatatatatacacacatttttatatagagattctatatatatacacacacagaacacacacacacacacacacacacacacacacacacacacacacagagtatacaagtcttccaggttggttttgtgccaattttgtttccattgcaattatagcatttaccagatactataaatacctatttacttttttacatgtctgccttcctcattagactttgaacacatttacaacaattagcacagcacttggcatataaatgatcgtggaatgggtgagagaagaaagcatttggattttcagcctgggattctgcacatgccatagacaagtcagtgatcttttttttttttttttttagacggagtctcactttgtcacctgggctggagtgcagtgtcacgatctcgactcgctgcaacctctgcctcccaggttcaagtgattctcctgcctcagccttctgagtagctgggactacaggcacatgccaccacgcccagctatctttttgtatttttttttagtagagacagggttgcaccatattagccaggatggtcttgatctcctgaccttgtgatctgcccgcctcagcctcccaaagtgctgagattataggcgtgagccaccaagcccagccccaagtcagtgttcttagatgttttgattggatgtgacactttccttcattcattcacatatccaaatgttgactacaagagaagatgtattgagtgcagcctttgccctcaaggaaagtaaagtctgaaagctaggctccaaattcactactttttagttatggcatgacccaaagaaagtgacattgagtttggtttggaagtacaattaagagagagtacagacacaggaattaagggagaggaggagataccaaacctattactctaaaatacaataatctcaggtaaagaaaaaacaaaacaaaacaaaacaaaaagagtagtagcagaagatgcagaaaagaaagggatgattagcatgagggtgaggaaccctctgggcgtttctccctctgagtggcaggaagctaagctgaacgtactccaagacaatgcttctcaaactggaaggtgcataagaaagagctggagcctcggtaaaacatcggtttttcactcattaaatttggggtggggccttgagatcctgaactttttaaaaattgattaaagttttattttaagttcacatacatgtgcagttttgttacatagtttttgctacataggttagtttgtgtcatggggtttgttgtgcagattatttcatcacccaggtattaagcctagtacccattagttatttttcttgatcctctccctcctcccaccctcctccaccctccagtagccctccgtacgtgttgttcccctctgtgtgtccacgtgtcctcatcatttagctcccacttataagtgagaacatgcggtattttgttttctgttcctgcaatagtttgccaagaaaaatggcctccagcaccatctgtgtccctgggacatggagattctaaatttttaacaaactccaggtaatgttgatgttgctgggatcaggcattcagcagtcacctgctgaagtttagcgtgcgtgcgcgcacacacacacacacacacacacacacacacacacacacaaaacctcataagctttcattctttcaaggactggtttactctgtatctttttgctctttttcctgacttcctttatttttagcctgacttttctgaggttcaaacagtcactgatgtgttctgtgatattaaaaacttatgtcaatttctttgattagttgacaaatactggttcttatcatttaatcagtggatcctccaagcatttattgagctcccggggagttactggtgtgggtacaaggcattgttggggacacaatagaattctaaggtatgagctctaccttcaaggaactaactatgaacttaaagagaaaggacagacatgcatagcatataggttataacaaaatgtttaaaatgaggggttcaaccagttgcattgaagatcttcagaagaagaggaagcgaataaatctgagacatccaggaaaaagagtatccttcgatggcgccctctggctgtagctctgctaaaatattacagaaaactctgctagcttgaccaactaactttctttgagaagcttggatggattttttccccctaattgttctgagaacataaaaaaaaaaggattttaaaagaatcatcaaaataaagccattggatatcttattgggcaaccggagagagaggatgaagtatagccaccagactttcccccatttgtgcacgtctctcagccacagcaagtgtgaacaaaaggaaattctattaagcagctccctaagattgagctccagacacataagtagctccttggtgtgttcctttggcctgtcatacaattcattaggccacagttgtttattttgagacatttaactagagaccttcttgagagaggcctacccttgtggtttgtcctgatctttctctaagtgtgggaacctttgtctaattggattgactggaagtgtaatgatcatggcgtgagttctgtaagcagcacataaaccatggacattcacatggaaatgaggttaattacacagcatagatgcatctaatgattgcacctgcagtgccacaacaacctccctttaactcagtttcacaaacaattacaaagagcagctgcattcgtttccacagttagagtttaaaaatctgtaatgatccccaacagaatagaggtgcagggggtgagagtgaggaaggagaggattcttccggttcagatgtccgtccccagccacctgctgattgtgctaatcccgggagccttgggcacagacatggagccacaataagctattgccagtcctggtgtttggcttccccctcaccccccttctggcttagagtttctcatctgtcaagattcattaacatggtgatgaagatttatgaagggcaaggtcagcaaaactgcagactacaagatcactgtgagtacccaaattgtattagtcagggctctccagagaaacagagccagaaggaagtttgtgtgtgtgtatgtattatatatatgtatatatacagatatatacatatatatatatatatacacacacagatatatatatatataaatatatgtatgtatacagaaagattcattataaggaatttgctcatgtgattacagaggctgacaagtcctaagatctgcaggcagcagactggagactcgggagaactgatggtgtagttccagatcaaaggccagcaggctcgagactgaggaagagccattatttcaactggaatcccaaggcaggaaaaaactaatgacccagcttgaaggcagtcaggtaggaggaattctctcttctttagggaaaggtccacttttttgtgctattcaggtcttccactgattggatgagacccacctaccttagggaggacaatcggccttactcagtctatcaatttaattgttacacttgtccaaaaacaccttcacagaaagactcagaacaatgtttgatcagttacctgggctcctcatagaccagtcaagttgacacataaaattaaccatcacagaaaccagtccgcaaatctcagaaggatttcttgggagcagtgctactgagggaagctcaaaagattgtttctgatcctttcatctaccattctccatcaccaaattgacgaaactctctgtcttatttttctccaatttctttttgttctcatctttatttctattttcctgtccacatgcctgtcattatccccatagacactgataggatttggctgtgtccccatcccaatctcatcttgaattgtagctcccataattcccacgtgttatgagagggacctggtgggagatcattgaatcatgggggcagtttccccaatattgttctcgcggtagtgggcacgtctcacgagatccgatgattttacaaggggtttcccctttcacttgactctcattctttcttgtgtgctaccatgtaagatatgcctttccttgtgaggcctccccagccacgtggaactgtgagtccattaaacctctttttctttataaatgacccagtctcaggtatgtctttatctaaagcgtgaaaacggactatacagacacattttaaaaatagcaggaggatactacaccacaacgggggctgactcccatccttaaacgtaactaaggctttgcatagacaaacatagctagcatgtccctttctgatgcgtatttggctctcagagtcaggaagctcggtgttatgtcagtgatgttggttgtataaaccatggacactcatttctaccttcaaaactgttgggcttttagaaacattgtatcacccacgtaaaaatattagtctcattactttatagttgcaactcgttttgggatccaaatggcattccccaactgtaaaaggtaattgactgccgccaaagtcaaatctgccctcaaatatttaaacatttaaggaatgtgcttcaggctctaagagcaattctgaaaaaaaggaggtccaaatgcttatgaaaaattgtataaactttgaaagggaccaagtcgaaggtgagaacaaccatgggggagtgtacctttttatatttattaaaataacaagatttatttaccttttagtcccatctcatatttcttttcatatcctattctccctaaaagacaaaagggactcacgaactaagcacaaccattagtagtcatctacaagacagccacaaattatgtttctccctgctctgatcactctggtcaacattaaactagctgccgacggatgagagacaggaggcgtggaactaagtttatctcagagaaaagacatctatcctccactgatcatctctgtaggtctccacacatcaagctctgcttaaggaagctacacaagacctttgcccttgtatgggcgaggaagatggggtacaagggtcgggggcattgttcatgaaggaaggtaagtgatagtttcctgctcaccccttcgttttaggggtcaatctcatatgtagacggcaaatgaagttttttccaagtctgaagtaaacaaacagagatgagaggtaccagtgaacttttgtaaacagactaactccctattgctttgactgtacgcataacctgatttgataaaatgctgaaaagaacacactctatcttccttttgcctctatccagaatagacaaattggggtgttttgaaaatgttcatgcctggccttgttactcatagctttaccttctcagaggttaatgacaaagtgatgttcaggccagtgactctgacctcaaaatatgttgccatcattaataatgatttgcaaagagtagaacatcacaattcgtgatggagggcgtgatacaggcacttaggtaaagtgtactcagggtggaaaaacctagacttgactaattactggcaaagagatgctaggaacttgtccatctttactcatacagtggcacccaactgatttctgccaagctgtgtgttgcccgaatttgatccctggtgatgctaaaacacataatacctaaataccttctgttatcactggtgtctctagaatcatgttccctgaatgtataaaaatcatttctactcgagacaacttaaaaaccacatcgtaactgggacgtttggaatacaatacttgcaggaatgtaatatagttttagcacttaagggaaacacgcacgtactttaaaaggccaccattggtttaatctggattttcaaaaaacagttcatccaaacaagagttctgtttatacttggggaggctcatttggcttgttctgttttgcaaagcacagtgtttctgtaatatgttttggtggcatcatttcaaatcaaaacaaggaaaggggttctcaaaaataaaaccagaggccagccaaatacggatttgctaagtcaattggttgtttgcttatttatattacacttcttttttctccctcctttgggaatctgtattaaaacacaaaacacacacacatacacacacacaccaatctaggcagagattagaacagaaaggagcaccatgtcctctggttctggcttctgtgttaatttgaaaaaagaggtttttatctatctatctatctatctatctatctatctatctatctatctatatctatgcatgatttttatagttacaaatgaaagtggatagatagatgctgggtgaacattttaagatgtaaaacaaagatactttcaccaagtcccacctgttcaaacatgcgatcattttttttccttaggggaaaacctctgaagctggtttgcaattgttaagctaatctgtagcctaggggagaataaagccaccaaaaccttatagaaatgaaggaaattacacagaaatgcccacccccagatttaacgttccacttccatgtggttttggaacacatgagaagttttagttgtacttggaaagaaaaaaaaacacacacaccaacaacatttggaagaaacattgctgtaaatatagagatcctctcagtagtgggggatgccacttattcaggttggcagtagctgtgttttatttaaaatattttttcgctttaccagatactggaaaaaaaaaaaaaaaccacacacacacaaaagtgtatatctcaggctgaggatacctgtaagatgaggatgttcatgaaacatgttcaagttcattcatttatctatttgacaatgatctatggaccacctactatgtaccaagtcttggataacagaagtggtcaaggtagatgatgtccatctgctcttagaactcacattctagaaggcgcttgcagaaaataaatatattaacatataggcaagacaatcccagatagtaatatattttattaatagaatgaaacagagcaatgtaatacaggagagagactaactgaggagtgtaagtggctgttttagatcaagtggccagagaaggtctccctgaggagatagcatttgacctgagacctaagtgcaagcaagatgaagccacccaagctaataacctgccaagtgtctgcttgacgtaggtttaatttcccattgcctaacccaatttaaatctctgtcctgtcgttccacctcttaatggtccaacaatcacatatccttcaaccttatcctccactctgcttctttaaaatttctcagctccaatcctaactagggttatttgttcatggccttatggtttgcttatagagatctaactcaatgaaagctcaatggactgtttactccacctcattttttctttttttttttgaaatggagtgttgctctgttgccaggctggaatgcactggcgcaatctcggctcactacaacctccacctcccgagttcaagcgattctcctgcctcagcttcccgagtacctgggactacaggcatgcaccaccatgcccggctaatttttttgcattttagtagagacagggtttcaccatgttggccagatggtctcgatctcctgatgtcatgatctgcccgcctcggcctcctgaagtgctgggattataggtgtgagctaccacacctggccctgctccaccccattttttaacgtccaaactctcccatccttcaagaatctttgtaaatggcaccttctccatggagctttttccaaaaccacttcagtaatgtccctttccttgaattcccatcccaatatgaatataactttttcatctcattttgtaatttcttcttctcctggtaccctagttatttatgcatgacacctgtttcccccacttgagtgtaaaccctttgagaacagctctttttgtcttaaccattagtatttcttccagttccttactgaaagtattccccaatcctctataaacacctatggcataaccaaagaatgaaagctaatctataaacacaaaacaaaaaaaaaggtgagggttttgggtgtgtgtgtgtgtgtgtgtgtgtgtgtgtgtgtttaattatcattattgtataatcacagtttaaaaggaatcattttctgcttcctttttattatatttgccttcttcactcaatgtttgggtcaatcaattggcattcagtgttaatgtggccaagttttctgtttggtgctgaaaagaacaactttgcctgtgagagaggaaatgatttccagccataactccagctaggtacttaccaggtggtctatttctactcatggaggaggttgaaacacatatcctatttaccaaagtcaaaagcagcatctttatagggaaataacaataatatgtgtcttggtttgcttgacttctcattgataaccttgctgaagaagattcttaagttatgttcccattcattatctacatttcttaacatgatgtaaagtcatagaaaataaaaacaaaaggtacctgagggatctttttgaagatgaatttgaagcttggagagataagatgattagctcagggtttcatcaatagatccaagactagcaaccaagactcccaactctaaacacagcatgttttgataccacattgccttgttctccaccatataataattttaaatgggaagagttttcattttttctgtcatactatcatttaagaattttagacaaattgtttctgggggaaaaacaatcccttaattactataatatgcaaatagaaaaaatccttaaaaaaatgaaacaaaaaccctactgatgaagtgtcataccagttgcatcatttctggctctgggccacccaaaacagagcaggtaggtagtgtttatctccttatgtttcaaaataactgactttcaggaagaactgaaactgaaattgttcccaacatcactcaaagggaactgggtgcaacgaggcgctatgggaaagtgaaaagaaagaaagaaaggaaaaatccacattgatgcatagtgtagccaggagtagaacattgatctggaggacttgcctgttccagcaataacaagagttgacatttgttacatgttgattacacggtattgtcttttggaggttaaatcaatcagaaatttcctgtacagctaataaaattggaacccatctgtggtttgccaagtcacgttagacattgtctcaggacacagtaagaatacttgggctttaatatgttctgggcagaagaaataagaaaccacttctttaattgagttagagttgttagtgctgtcttctagtaaagtgttcgatgtaataaaaagtattattataactcccatttattgaaagcgtattgtgtagcaggtacttttctaaacacttcactatagaatcttagtttcttgaaactaaacctgatgcagtaagtgttattatctccattttaaagaagcagaaactagatttcagagaggttaatcaagtttctgaggtcacacagctagtaaacactgtatttggaacttgaactcaaatatcaaaatcccagcttgtatccaataaactccagtgtatgtagtaagtgttcgcctaatacatgattcaactgaacactagtaagacttatttgaaaagcaaaatcttgtagtatccactaaaaatgtttatttaattggactattttgttttataaaaaagttcttttaaggagtaaaattgttttgaatgtttaaaccaagtacctcctaaaacatttggctgttttctattttgaaataattctcaggcaatggataccatgtgacagattagatgagcctcaaggattttaactacatttaactcagtgctaagactagtttgaataaaataaccagcaaatgaataactcattttaagttgattcctatttatatcggctttcaaggactatcacatgaaaaccaattcagagcttcacagattcatatttttaacgattttaaaatgcaactctttcaagaagtttctgctgattccttgtaccaaaggccatgcttcttcactgttaggttatccagcctcagtgtattcagtttgaaccacatttatattcacatttgagttactactttgggaatgcattttatacaggtagattttgtgggtttttttttttttttttttggtgggtggataagatttttccctcaatttgcttaaaacccatttctaaacttcattcaatctcagatgtcattgatttgttaaaacatatcattaattaatttcggactaaaactttttttaaaggccaacaaccaatttattgaacaatgtttcataaccacttgaactattagacttattccatttctacagatgttaaaatgtaaaaattaagtacattctagaacccatgaaatatatttacatatttttttctgacacttgtaggtactgaattcatatttggattagctaactggttatggtgggactagaaaatgtttaatgccgctggattaaaaaaattctataccactttaatcaataagctgattatgaaggtggaaatatgtggcatgttttcagaacatagaattgtttttattttccaaaagtgaggctacgaaggttcttgtcagctctgttcattctgctgactacctcagttaaacagcaggtcaaattgcccaataaacttatagaatttttgtctttacttcattttatttacttatgtttattttacattttcaaggcttctaatgctaatcaggccttagaaatcagtggaaatgctctatgaaataattgtctcatagctacaaaagctaactgtcccattttggtaagatcagccaaattagtttgcttccttttcacaccctggtgtcctcaagaaattcttgtagaggagacatattgacatattgccaactccttctcatattttgtagatctggtccccctatgaatcagccacaactcactttcttaaatttccttaaggcccatactggcttggcccattttgcctcccgtgtgagaattagcttctagctatcctagtgctgtagaggccctttaattggctgcctgataaatgacacactgtattctttttattgggataattcccaggcaactgattggatacagagaaatgacagttaccggaggattgctggctgggctgcagtcttgcttattaaccaacacaggtgggactggtatttgtcagcctgaatttccttctgcatttgtctttgttactgtaaggcagacctctggctcacatcaagatgttggaagtgaattcttacatatgtactcagcctgaaatttgactttcctctgaggccatgtcaatacggtcaatacaaaggagagaattcagcaacttatccaaaggactcaaggccccaagactgggaatggaggaaaattaagtttagaacaatgaagagagacgatttaattatgtaagttttcagatatctaggcatatgtaaattccaaggtcaaagcaacttctcgggagaattgtgtccctaccctagacaatgctgcagaattagtcccatctttatgtttcctttaatgtcacgtgggtggaaagaatggtttcttcttcctataaggaaagtagaaattgcttagctagagtgagggggtttgcctgtctacttacagagatattaaaccaagcccactttccccctatttctttttttctttttctttctttttttttttgagacaaagtcttgctctgctgctcaggctggagtgcagtggcgcgatcttggctcactgcaacctccacctcccgggttcaaccaattctcctgcctcagcctcctgaatagctgagattacaggcatgtgtctcgcctggctaattttgtattttttagtgaaagacagggtttcaccatgttggtcaggctggtctcgaactcctgacctcgtgatctgcccgcctctgcctcccaaagttctggaattacaggcatgtgccaccgcacccagccccctatttctaagcatgaaataatttgaaagattatattgctgtacatgatgcaccattcttagactttttttccaagcctatcatatgcagtttgcctccagcaattgacaacatcagttttacatgcaggcatggacagctacaatttggcaggaaggttgaagtgaccttttatatttttttctcattggaagggggtcaactttgagctacatctatagttccctttaaaccatgcaccgtgtgggctggccttgacgggatctgagccagcccaatgtaacatcttccattaatgcgcctaactactctggggtcttcctcctgttctgtgtgtcataataacacaccatgcctccagcaccttgtcaaatgttctttcctaatttagaagtgttttatcattccagggaggcaaaaaattattgtgagaacgaatgttaaattatacattcaagaaaacatattcctaaggaaaaccagggaatgggccaaatttgactgaagcccactcaaaaatatttttgtgcttcagttactctttcttccaacacttaattttttccatttctccagaatgcccctgattttatttaactagtcagaatttttaaattgtagcaccttgtctgggctgctgtctttcaatgttacttaagctgcaaaattctttccttgttgcttctttgtctcatctgactctccctctaatcagatttcaaattactttacagcatagaggtagaacagcaatctgattaattaatctattatgttacattaaaatgataattcatgagttgaatcatgttatttctttctttttcttttctttttcttttttttttttttaagacagagtctcattctgtagctcagagctggagtgcagtgtcatgatctcagctcactgcaacatctgcctcctgggctcaagagattctggtgtctcagcctcctgagtagctgggattacaggtgttcaccaccatgcccagctaatttttgtagttttagtggagacagagttttgcaatattggctgggctggtctctaactcttgacctcaggtgatccacccaccttggcctcctaaaatgctgggattacagtcgtgagccaccacgcccggacagttcatgttatttcatttcctcatctttctgaaatcattttatttcctctattctatttaatttttccagccatcataaatgttaattcaaattttcttttccctgaccctcccacccaccccagcacactgtgagctcccacttcctgctctattttatcctgtcacaaatttgtagtactttaattaagtggtgctaccaactttatacttaatgctcttctcttttacatgatttttttctctccaactattacaaattatgttataccttcttggaagacagaggttatagtagttagtaagagcataagaaaaagagaaagaccaatgatctaatgttttctctactatttactgactgtgtgattctgaatatgtttgtcttttcagaattgctttcacattctctaaaaaatgggaataataaaacacctcttaggtggtatagtgagtaactacataaggcactaaatagaatttccttagtctacagcctgacatgtaccctgtgcagtaagtatgaactcccttatagtaggtgggtgcaaaagtaattgtggtttttgcctaactatatgtttttattctcagtacttgcctctatgcttcactttcagcaactcataactctttgttgattgacgttgatgcaatcatcagtttatcctatcttttgtctctccctaaaaattggtttatcttcaaaagatagcctgatgctcagtaagtcagtcaagctctttacagggaagcatgtgatattaacttgaggagctgctacagacattgcgtagtatacagaagcagatcagcagaggtcactgtataaatcctgccaaccaaggtagaaattcagccaccataaacagctattttggaatggaaaggctagagaaacagcatgcagttaaaaattaatagtgtgctataaacttttcctttaaataataaattgattttggatttgatagagttagagtccctgtaagacatctgatgaaacagttccaagtgtgagccagtggaggcacacatcagaggcaggaggactctgtggcttctctcaacgctcatgcattccctcctttcctatctgcggggctaggaatgagcattatttttttgtttggggtagttgcacttcggtaggtttttctacaagctacccctagagggtgcaataaccctctccctcttacgttctcagctagagaccaggggcatgtgtactgttggaaagttaatctgttcaaagtaacagccagacccaagtgactcaaaatttaattgcaaataatttggacccaattttcagccgattagccttataacctgacagttataaagtgcctactatgtgtacatcttcttctgtttgcacaattttccaattagacataagaaacattaaattgagctccattcctcaattattaaaagttgacctctatatttctaggtcaactagaatagtaattttaaaatctgatattttatttataagaagagtgctttgtctcatttcctacaaaaaagaatgttaaaaaaatgaacccctatttagtaagtataacttttaaatttgaatgtagagtgtcctaatttgctgaaataaatttttatattaccactttatatatagattaaaattgcatctttaattttttttactcagacatcgattagaaatataaatgtttcttgttcaatacttatacttactaaaactgagtttgaggaaatgtcctctctaagccttagttttcttaattataaaataggagataatatttgcacatctggcacatggctgctctaagggtgaagtgagaccatccatatgaaacacttagaacaatgcctatcatatagtaagcactcaataaataccagctattaagaaggatacataattttgtgttacaatattctataatctttaataaatcacagctttgttacaaagaggcatatcacataattctatctagtcatatctgatactattctaataatttagatgtcatttattgactatagacatatatatgtaatgcacataaagaatgatttgagacacaagtcagagtggttgctggtaggaaaacacacacgcacaaacacacaaatttcacttagtcaatttgaattgtgtcagtcaatgacttagaactgggaaattgtagagcttcttacatttcagtaacaccagtgccaatctgtttgtgccattttaaaatgttttgagcaaaatgtattttgtatcttggcaattatgttatttgaatccagagtacccactcataaaagcatgatcaagtagggcaataaagattggaaggataaaagagattcgatatcttacaagtgtcctcttgcaatccaccttccttttacagaactaaatttgtcttagagatactgccaattatcttaaaaaaactgtactccgcacctattgtcaccttcttcactcaatagaaaacaaggggcatctgaattaacaaaacggaaactctgaaaaagttccaaacggcttcctcaaatgtagcacctttaccctcagaatgtgaagttgacaggttaggcactgacttaggaatttgcttttaggtgctggagatccccgtgaccaaataaatcttgcctcacctactaactgatgcttaaaactccactttagcaaactctttccttttcttgcaggtttttatctgtgtgaggaatatagcttcatgatatcatcataactttatgatttcaatcatttaaaatctaacacaactgaagaactcgatgacttattagtaaaatggtaagatagagtattcaaaggcactggttctctgataaaaagaagagcgttaggccaggtgcggatcacacctgtaatcccagcactttggaaggccaaggcgggcagatgacttgaggtcaggagttcgagaccagccccgccaacagggtgaaaccatgtctctactgaaaatatagaaaaattagctgggtgtggtggcacacacatgtaatcccagctactcaggaggctgagggaggagaactgcttggacctgagcaacaaagggtgcagtgagccaaaatcatgccactgcactccagcctgggtgagagtgagactctgccaaaaaaaaaaaaaattaattaattaaaaaaaattaattaaaaaaaatatatatatagagagagagagagaggaagagagtaaaccagtctagaaaaaagacctccaactcaaagccaacattatgaggacataataccaattcctttcaagttttgttaactcttcctaggtgaatgggtgagactgcatgtctggtttctaattgtgtctgtgcaattttgcttcccagatgatggctatgtagggtcttgtttgctggcttggtctccttctattttcaatctgtaccattgttttagcttctgcagtataaatacatatctaaaggcacatgtgtgtatgctgccccgcttttctgtgggtgtttagtgcaaggcatacgtgatttgtggctttggcggcctgatttgggttttgcccttgagaaaaaactctggttctgatgtgtgtatatagcaaatgaagcatactaatggcataattggtacacggtggatcatgctgtaaccccggattgcacggatacctcaacagtgagctgacttaggaacagcacgttgcactttgccttccgtaacctccccgagtgtgcccttccaggtgagttgcatggagctggggattgtccaggttcttgacagtaggttttgtttcaagcaaatgtaatatgcttacataataaacattttatgtgacacctgaaataaaattgattatcctggggattatctttgccagtctctgccccttcccaagagtactgctatatcaaagcaaggagaggctttgaaaggtgtgagaatatccacttcatccattccattgcatcaaaagcccctttgtcagttggaatcgctagataacatataacattgttccacttaagcataagccagaaagtgacgtatgaagggtactttcagatgtcccggttaaaacattaacttgagctgagatgagtagagagtcttttggaccaaggtatgaatatctggaaggcaaagaaatttttcctggactatattacaccaaaataactagttccatataggagaggaattctagtatcttacaagtgatgagtgcattttgcatatcttagtcaacagagactctgggtgagaaaagcaggtgttcttctaaaatattttgcttccagaaaaactgtcttcctgggcacactgggagggcttgctcactccacagggccctgacagtctgatctgatcaaatagggcactggaaagaatttggcaaaacgttattctgatggattggtgtcataatcccatcacctgtttagcagttaatttcactgttccagtcttcctagtaatattacctaaggaatatgttattccatttcccaaagtcgttacatttttcattgtcacctggaaatccacacgttaaaaactgcttaaatcggctgggcgcggtggctcatgcctgtaatcccagcactttgggaggccgaggccatcagattacgaggtcaggagatcgagaccatcctggctaacacggtgaaaccccgtctctactaaaaatacaaaaaattagccaggcgtggcggcaggcgcctgtagtcccagctactcgggaggctgaggcaggagaatggcgtgaacccaggaggcggagcttgcagtgagccaagatcgcgccactgcactccagcttgggtgacagagcgagactccgtctcaaaaaaaaaaaaaaaaacaaaaacaaaaacaaaaaaaactgcttaaatcccaagggaaaactggcattgaactgaatggttttcatttttccaatttattttttcggtcactgcctacagaagttttgagtttaagtgaacattgccaaaaaaaaatgtgcagatgctcaaatctttgcaggatttataatattatatagggactgttttatagcccattacactaaaatgagttggatttattacatgccaaacaacaacaacaaaaatcacaagttggagaataattaactggaatagacattttttttatccttctactagcaaaaaaaaaaaaaaattgtaattttatgctccagaaaaactcattcttaaattttatatctgagtttgctttgccaaactcatattgtttttaaataaatgataaaacgtactcttgaggcctccatcctacaaaggacttgagaagtgccgttaatatgagtctgctgttcatgtttgttcttgtgtatttttgtaagctacagaacaaaatgggctggccatttttttaatgcccattattacctccaatctttctttttgtccactctttatcaaaattctccttctgagacaggttttatggtacacattccaaagtagacaacaaataagttgttgcactttaagagctagcatttgaaagagcagtatataacatccagcttccagaccgtatccttggccccaagcaggaggcagaaaatgttcctatggtctgagcactcatctgaaaggcttgtgacactctgtgctcctagtaaaaagtagcggctccaggccgggcgtggtagctcacgcttgtaatcccagcactttgggaggtggaggagggcggatctaaaggtcaagagattgagaccatcctggacaacgtggtaaaaccccttctctactaaaaatacaaaaattagctgggcatggtggcacgcacctgtagtcccagctactctggaggctgaggcagtagaatcacttgaacccaggaggcagaagttgcagtgagctgagatcatgccactgcactccagcctggcgacggagtgagactccatctcaaaaaaaaaaaaaaaaaaaaaaaaaaaagtagctgctccattcttctttctcctatcacagctcaatgataccattataacgtcatgcttccctttagggatcatgtattctaagagcaccgatggcttattattactctttccatagaccacacagttcctccctgaaggctctatccacagttacaatgcccacaaaccccatcactattggaaaactctgaatcatcaaacactccttactattatgtatcaagagtgcctttttcttaaacaatagtaaaaagaaaaaaaaatgcaagtattttacaatgttattttgttaataagcccagttatggttaaattcaagatataagtgtcacagaaggaggtggttgaagcatcccccaaaggcacaacacgcacccgccccccaacacacacacatacaatgatacagggtgaatttcttccagcactttccttttttcatacgtctggaattctccttaccatgagtggtaaaatttcaggaaaattcagaaacagtattttagtattacataatgaattttcaattttccagttacagatattttaaccacctccattactaatgtgtggtctgcaggtatgtgtcagcaagttggtatctcagagtagctgtcttgtctcagagtgaccccagacatgaaaagcattgggaaaagggacacaggtctgaactctgggcttgagatgttatatcagatattattttctgcttacatttttatagtagaagattgattatcatttgcccagattttatctatatctataaattggcaatggcttttttagttatacaattctattttactaaggaaagcacctaataatgctactgaaaataatttaaccaagatgtcaccatttgtgagcaagcaaactctccctttcttctattcatttagtcagttaatttatttaatttattcctctccttggaatagaatataaaaattcaacattgcttgtttcctactaagtgcttgactgtatatgaggttcaaggaaacagtcagtattaaaggggattaaagaattggggctgaaggaagcggggaagatgtctcttctctcagaaacagagtggaaataagccatcattctcagcaaactaacacaggaacagaaaaccaaacactgcatgttcccacttataagtgtgaaatgaacaatgagaacacatggacacagggaggggaacatcacacactggggcctttcggggggtggggggaaagggaagggatagcattaggacaaatacctaatgcatatagggcttaaaacctagatgacgagttgataggtgcagcaaaccaccatggcacatgtatacctatgtaacaaacctgtacgttctgcacatgtagcccagaacttaaaataaaattaaaaataaaatagtttcgaaaagaatatgcacatatcttatgtgcaaagaatatttgaccaagcactgagagttgctaatcaccttcaacacccctgcctcctgggtacttggtaaagcttagtgaaataacatatttatgttgaaataacttttggtatcaaaagaataagacattaatttgagataacattttgctgaaactacgttatgtacctctttggatgaaaattactgaaataaaaaaaaaaaaactctaacaaaattaatacgaagattttttttcttttatttttttttcagacagactctcgctctgttgcccaggctggagtgcagtggcgagatctcagctcactgcaacccccgcctcccaggtttaagcgattctcctgccccagcccactgattagctggaaatataccaagactttttaaaattctttttggcattaattattgaggaaacaggatcaagctattgtttctgctggcaacatacacacatcttatgactagaggtgaacttaatcaattcaggtaaccaatttgttaaagatttgttacacaaacctatgtcctatgtagagattgacggcacagtagagttcaaagagctgatcatatagcttcatcacagacatgaaacaggcctgactgcatgaaatacaatgtcacatagtccagtcctgaaacagtagttgccagcttcccacgtgcaggttcaagtttctgagatagagtatagtctcaatgttaaaataacaattgtaatgattaacaacctctaggtagtggtgtggacgtctttctacatacacatacaggatattaaccttcacacttcaaaccagtccagcaagcacaaacaatacattgagggaaggagaattattgggaaaatagatccgcataggaggttggcagcagcctcagagaaaatggcttgttgtaaatactaagtcatgaatgccaccgtttctgtatcattatgctctatttctggtgacctctacatagtctgagaaaatgctgaccagaataggtgctcgtaggatgtaagtcataatgtgctacaaggtagaaattattaacaaaatcatgctttttctggtcatttctcaagatgtttgcaccctacccaggtacggtggctcacgcctgtaatcccagaactttgggaggctgaggcaggtgaatcacttgagctcaggagttcgagaccaacctggccaacatggtgaaaccccatctctactaaaaatacaaaaaaaaaaaaaaaaaatagctgggcatagtggcgggcgcctgtaatcccagctacttgggaggctgaggcagagaattgctggaacccaggaggcagaggttgcagtgagctgagatctctccattgcactccagcctgggtgagaagagtgagactctgtctcaaaaaacaaaacaaaacaaaacaaaaaaaaaccccaccctggtcagaggtctcttagtctccttggttattgctgggctacatataaagaaaaattttccctttaaagtaatccaacctttctgaaaagccaaccctcaaactcattcatataataaacattatgctgtttaatcctttctggtatttaatgcccaaaatttatttacttactgaaaagagcaacataaaacaatctaattaacaatacctggtaaaatactttaaggctggtgacgcttttcttaccctccttttttttttttctcatgatagcaattacaaatgagcttgagatagaccaaagttgtaatcatttcttgttagtttgtttgttctgtcttcaaatggcaaataaaactggaaaaatgcttaaacttagatactgtaaagttttgcagttcatcctatagatcttgctatttgatttggttctttattctcagaggtgcctttctcatgcaaaatgatcgatggaaatgtggcaatcttgtatacacagtgaatatgagagtgtgattagttttcattagaagatcaatagcttctttaaatcttcgaaacgtgtttagactagcctactttattaacttggcaatggatttttttttagcagtcttgaagtaaacacatgatttttatagtctagcaaaattatattggaaatgcaaccaggaatacttgaagtgacataagcacaaaagagtattatatttaaaatctttatcaaatgtttaacaaatcacttaataaaatttcagtatttcagcacaatgacaaatatatattccatactaaagccttgtaactattaataagtaaaaaccaaattggctgtgagattcctagggatgagtttaacacagggtttctcaacccaggcactaacaacagtctgaggcaaataattctatgttgtaaaggttgtccttgcactttaagaagtttagcatccagcctggtctctactcactcattaccaatggtgtctcttactcccaccccgagctgtggtaaccaaaaatgtctctagttgcaaaatattccctctggggcaaaaatcacttgaagctgagaaccactggttcagtataatacaaaataggagttttcatttgtttgtttttcttagtctttcatgataggtttataattgtacctaagaaagtatatgggctctatcatttcaaaattacggcggtaaatataaatggcattgagtttttttaacatgggctattagaatcaaattgatagagaaagtgctagataagggaagatacatagtggaaaaaccttaaagtaagctcaacacatttttaagaaggctggtgttgaagatcttatcacacttagtaacaagtgtgaactacaaattctaaacattggttttgatggtagacctcgtggtacccaaggatgggctgccaacctcttatcgaagcaaattttaagggtacagaggcagaattcaggtgatactgaaacaacacaaaccaaacaaaagtgctagtttggtaattaatggcttctgagggttggcttgtagggaaatggagcttggtagaggattatggaaaaaagctaagaagatgcctggtgcttttgtacccacttgctcattaataggtaaatgaattgaaggctgagggaagagaagctcatgttcttcttgcatgcttgacattgcaactacattttataaatgtaatgttattgcagatgaatgtgatctcctgttcttttctggcccaatgcccagcacgatgttctgcatagaatccagtgctcaataaatgttcagtaattatggtaaacaggagaacctaactaacaacagcataatttcccatttgaagaattctagatagtaaatgcaatgtccatgacagttaataaagcaatgtttcatcaaatccatgtgctactgatattcagagataggatatgatctcattaccaaaaacaaaaattaaaataaagaaagaggaagaggcagagacagtgctctaactcccctcctcatgatttactctaaggagaacatatcactaactttgcaacagccaaatattactagacttcatcttcacctttctgaaataagaaatattcactaaacttttttttcatgctaatggaaatgggaaacaaaaaggtaggctcacagtacctactatggcaagcttgtatgcttgctaaaagttttggctacttgaaattggtttatgtaaaactaaaaatggagcctgtggattgcaggttgggatcctagacttgcccagtggcttcccagaatgtaagctagacactgagaaccaagaagaaacagcatacctagcagatgtattactaagctggagttacttctgatagttaattagaaaagataatttacaagcaaaacatggaagactgcatagaaagaaatttcacaggatttcatatgtccttcaagaaccaatggttctcctttgcaattaacaaaatatcccaaatccatactatgatctagaaggtctgcattcttccacctcttttcccaaaagctttccactcttttcactattcttcagccatttcatctttcttgctacttatcttccagcttcaagaccctgtgttcaccatctttcttcctagaaagcttctgtcttcaaattttctacatctagtgcccactcatcatcattcagtgctctcccagctcaaatattactgctcaaaggaaatttcttcaccttctctttctagctaaaattttcactaactctgatcaaaattccttgttgcttactttgaactctattatcttgttttattttctcctaaaacatgttgacattattttaatatttacttgtttacatatttattgctaacctccttttgctggaatgtaaggtctacagagtaagaattttttttcaatctcattgaccactcagaattgtttttgatgctacatgttcttgatccttaaaagcaacttgaaaccataacttttgactagtgtgaagagaaggaaagatctcttatctgtattactattattcctcattaaactattatctggggtaacaatgaacaagtaatatatgaagagaaaactgtttctgatcaagtaatactagtcttgactcatatagatatagcttgagtattgccctctcatgttatggcctcaggcccaggtgagcctccctcaaaggcaacagaactattacccagggttttgatgaacaatgaaactattttcacttttctacaagggaaaggggcaataggggaactgagtttcagtaacctctgagccaccatcatgagaatttgtgtaacctacaagaggtctcccctcccttcgtccctaaaaaatatgatttaagaagtagcttcccttcactttgaacaggaaggacaactaggcaaaacctagcacatttgaatcattttagatggtgaaggggaataaaacagttgtgatataattaaaatgcttttgaaatttcgacattaaatatttaaaagtcagctctagaggtacttaatttcatagaaataatctgctgtgttgcaaaattttcagaagtgctgctagtaagcagatgggagtatgaattgaatctctagctgggcctctgcaattcacaaagaccaatagcaaagtttgttgcaattgcaggcagatagctgaggaattagaaggccacattggcttgtgaaaacagaccacaacaataagaactgtgataaaaactctgaaagaatctttatacttcaaactatatactctgaaatcaagcacattgccttcatgcccagacaaacatatcttcaacagaagggattctggggcttgtgggagaagaagatagtcagtgaaagagaaatatatcagaatgatggtgtggaattgaaagggaaaacaatgtgaacagctgtaggatctggctttacacaagcagctggaagggagtgcaaggatgtctgagaagctctagtatcttctaatcagccatgggagagagggcaagaacgttatacattctctgtgtgaatgaaggcttacgtcttgatgaaagctttgcctccataagggctttcaacaaaagatgaagggaagctaagcaaactgaagactccaagttgaaatttcagttgaataatttatttctcagcaacatttcatattcaattactctgtgtacagctaaatgattgggtttctgccattatactagtaatcaaaactcttcttagaacatttttcctgacagctgtacttctctaccaaaggcttcatccctggaatatagcaaattagtcaaatcaaattaacaagcatttattgagtgactctagcccccaaattcctggagaactgaagccatctctcattttgtttgttagtttattctcacagtaggtaagatgcagtaggcatttattatacaactgttgattgaatgaacaaatggattaattaattttcattgccaatccatgtgctttccagatttacatctcctttaattagatgaatttccctttgtggctctggagctgtgaccacagatacacattaaaattgaggcaagtccatttggcaatttctcactctttttcagtggcatgtttttgcagctaaaaagaaatttaaaggcgtctgtcaagagcagcggcaattgttagagaacttagatgcacggcataccaaaaagaaaaaaaaaaaaaagcacttctaagaaagctctgacctgaaaatatggatggattcgctgacctggtattaaattaactaatgagaagttcatcggcatctgggcccaagctatgggttaggaggaggagcacaatcactcacttaattaattacttaattaacctttaagaccagaacttttggtgggattctcctgagatttaaagaactttattattgttattattatttttcaaaatgaaactggctctcggtatgtggttactcaaaaagaaagggaaaatttttaggatagccatgggtattttttaaaatggtgcccattaaaggtcataatattgatgcaattttccagggctggtttcagttttcccacggagtggtaattgggtcattgggccagtccttctcttgactgaccagtatggtttcaccagatctggataaaaatagtcttttgtaggaattgttagtcactatcagcttttccctgagttaatttgcctttccttcaaggtgccaaaaccacctccctggaaacttaagttttccatgtgttcatagaagaaggatacactaatccaccctaccacagtctgaatgttctacagtcctgactgagctgaactagcagtagatcatttattttgtggcccttggactccagaagcagccaaaggcttggcaagcattgtttttatgtgaacagccatctcctgggaataaggagatctgcctcctggttggttgtttcactcctgttttctttgatgagttatatttcttcacttaaagtttaaagagctcctttctcaggagagttgcctgaggtcatacaggaaggtgactgggccagcttccagtaaagaaatggttattcctgagaacacagtctgcgtagattgaatccaattgaattgaaatcacccccacaaagttttgtagtgtaacaagtcaaggtaactaatatcactccctgccatacaaattggttgagttgtggcagagtgcagagattagagggttagatgctcctccttcacattgctgttggttcccaatgttcatccaaatctagaaaaaattaaatctttaatagaaggaacacaggaccatacaccaggggacccggattttaggtatgtctagtttactccattcatagcacgaagacttttaagttcctaacatacactaagtgttgaaatatcccttagtgctccatcatcatatataaaatggccagatgtaaagaacaaataacgcaattttgcgcaatggctttgcaaattaaaacagcagttctcaaattggggtccatggtgcctaagccactttgagttgtctgagacatcaaaacgatactttatgataacacaaacagcgtttgcctttcccctctgtgttaacatttgtattgatgggacaaaaacaatactggcatcttaagtgtgaatcaagtcagtggcattaaagatagccaatttcatttaaatctttaaggaagtaataagaatcattaattttattaaatctggatttggcatagatgtatttttaaataatctatgtgataaaatgggaggcacttataaagtactctgactacctaaagagagggaaaaatacagctttacaattctctgagttgtcagcttaactactcactttttaaatataaacatcatttttacttgaaagaaaagctaacaaattatgattattcagagttgggtatttggcagacaatttttcaaaaatgaatgaagtaaacctgtcacttcaaggaaaacaactggtagcatttgttgtgcatgatgaaatataagtttcaagcaaaaatgagcattttgaaaaacttgtttccatcaccatgggcatggtttccgaatatttcaagacttttttggcatgattggtgctaagattaacagaggtgattgtttaatataatgaaacctgtccatgttcagaagatacacataacttagtgaattattattcttcaaataactgatgcaggatgttacaaaatcatgcaaggctaaaagacccatctgatagatttttaatgtaacagagtacaaaaagcccactgacactatttcacactccacatcccaactaaactttaaagatactaactttgagggagttttggtataacatcaaagaagaaatatccagaatcatctgacagagtattaaattattcttccctttacaaattcacatatttatacatccatattttctttctataattcaaccgaaacaaactgtagacacagaaacatttcagaagcagacatgagaattcagttttcttcttttaaactagacattaaagtggaaaataatgccatcttctctctcttttaaaaaaatagtcatttttcattaaaaatacattagtcttccatgtaaatatttctgttgtaagtgtattaataattttaaaaaattactcacttttaatttctaatgtaatacatattatactagacagcacctcaataaacaaaaagccctcgggtcacagtggtttttcagagagtaagggggcttggaggccaaaatgtttgagaaacactgctttaatatgatgtacttctgcttctactccatgttggtgttaataacagaacttaaaggaagatactgaaggatccagatactctaatcttttctgctctctgggatcttctggaggatatctgtccaggtactcagagctgttgcactagttcatgatttatcaggttcaccacttaatcaggtttggacctcgtaataaaaattagaattattggtcatctgttttcaaaatcttgtattaactgattttcccagtttcaagtggattatcatcccatttttttaatccagtttgtttcttcataacaaatacatattgttttgtaaagggcaagggatattcactgtaatccatcaaaaccaaagccagtttaccttgacagctactgaggtgatcacttttgttaggagtgctttcttctacttctgaaaagctttcctctttggaagccatcaaattgtccccaagcaatgatgtgtacatcttaaacattagagcttcaggatgttctgagaagatttatattcacagtgttgcatgttcaacaagtggaggtttaattacaattcagttattagaaacaaaattgtttttgtacctggatctatcttattgtgggcaattagcttagaaccataaatagtaagcttagttgaaaagttaaacattaaccacagtgtgtcattgcctcactctaactgtgttgcagacctacaaagcacaagaccccatacctaagggtgtccatttaatccttacaacatctccccctctcctaaaataggcagttatttcagttttgcagatgggaaaacagaggctcattccatgagaaatttgcagagccaagattaaaaatgggatttgtgtaacttcaattttttcttttcttttcttttctttttttttttttgagacagagtcttgtggtgttgctcaggtttgagtgcactgactcactgcagcctccacctcctgggcttaagcagtcctcccacctcagcctcctgagtagctggcactacaggtgcacaccaccacatctgtctaatatttgtaatttttgtagagacaaggtttttctatgtagcccacactggtctggaactcctgggctcaagcaatccacctgccttggcctcccaaagtgctgggattataggtgtgagccaccacacctggcttttgtgtgacttcaagttgataagctctgtaggtaacatggcaaggatagattagaacagggaactatttcaggtactaaaccagttaggaaattattgcatgtcccaatgatgacattttctttctttctttctttctcttctcttgaagaatgattcaaaagttttccaactgtttgcctgctacaacttcttacactcacaaaaaaaaatgatcaatagagttgacagtatttgttctgaatgactctcagttaaggtgtttcctatgtactactgatatatcaataacccctgaaacatagctaatcaaataactataggtgtttgattgagagctgtggttttgcatttcagaaatcagcaatagatgcattttcacttgaatctaattaggtggaccaacttttatttttcttactaaaaccatctcaatctccatggtttagttatttattttcttctttgtttcaagatcataaatggaagcctgaggagccaaaacccaaggatgtgctgggaactccactgagaggtgatctctgaccactggatcactttcttctagaggtaaagagtagatggctgggcactgtggctcatgcctgtaatcccagcactttgggaggccgaggctgatggatcacttgaggtcaggagttcgagacccgtctggccaacatagtgaaaccccatctctactaaaaatacaaaaaaattttagctgggcattgtggcaggcacctgtaatcccagctacttgggaggctgaggcaggagaatcgctttaactcaggaggcagaggttgcagtgagccaagatggcactactgcactccagcctgggcaacagaacgagactccgtctcaaaaaaaaaggtcaatttaagtaatttaatatgggcctaatcctagatgtggaaagtagattttgatagaatgaaagatctcatccctattttcattcttatagtataatcatatttgagtttgtaattccattcactgaaaaaaaaaatcagttggcaaaaatgcctatagaagagaacacaagcatttctgagttcaaagttcagatttcaagatttagcaaatatttctgatcacacataaagttgtccatggtttctgaaacgtgctcatcttgctctactgcgtaagaccctcctggatttccctctacattcagggtgaagttgctacttttgcatcttagccaacaggctatgtacccccaccagtgtctactctccagccacaggtctccttgagactacggttgtctctttctttctagccatgatgatgcatttgtagttgtgtagatatatattcctctgataatgctcatcctactttattttcttgagatggtctccctcctcccagttttgtctttctggtgacatacacaggtgtttttgagactcacctcaagtgccacctactgatgggtaaaaccaagactggacctcaggaaagcccttaatggtttttatttgtttatttatttatttgtttttttctgacaaacatcctatgctcacccagccccaaactaagaagagcacatttcttctggccagctattactgtacttaaacattcttccatcagagtccttccaatactggtatgtttacatccatgtttcgctcgtaaatttataaaccccttattgacagaggcccattttgatttttgtatcttgggcaaatatcagaatgttaggggtatattacatacttaatacatatctgttgaacaaatacatagatttcctttagttcaaagactttttacttctgctcaactttacaaaacacacattaaatcagtatcctgactgatttaagaaggaaaaacaaatgccagcatggatcgcagaaatcctaacctgtgatcactgaaggaactgatttttcaggattagttgatactaattgtatggtttgaaggatacatgggatttagtaactaaatattgttatcttgattcgagttatatttgaaactgagtcaacttgtgcttttactagcacagctaataaagacagcattattatagtaactctattttctgcacaaatgcaaactttttttgtattttaactaaactgtgtgatgttttatgcttaagaagttacctagtccaatatttgggggaaaaacagatacttggcaaatatatcttgaattattaatgaataaatgaaaatagaagaaattcaattcacttctctgattttatagatgacagaattgaagcccaggtagttgcagaacaatgacaaataatcatcaatcatcacggctcctgggtcgatatctacttttctgtatatatagtagatattataaactgtaaggattttagatggatagagcacacagtcagggacataaaacctcattgcaggataagaaccactgatcataaacccaatacgtaccttacattttactgtgtgctatggataaagacaagaaatgagtaagccagaatgtcccatgaggtgagtacagtctcatagaggaagtatttatagttcagtatgatgtatgaagtgttagggggcacaaatgagaaagcaactccacctgaggtaagagaggagagaagggaaagctacagggaagaggtgacattggatatgtctcctgaagtaggcatgttccaatctcaagagatgaggaatgacatttcaggctgaagacacaattgcagctcatcagaagtgataaacccatataacaaagtggttccctctgcagtaacagaaccaaagctgaccttagctgcgggacattattacccaaatgaagaaaaatgacaagttgcttttcaagccatcccagagtgggaagccaacatgccaggagctataaagagcctcagaagaatacgagaaaaagaaaaagagttgtaccctttcctgtggcaaaagcactacaagccaacacaccttggttctgccagattgatttttgcataggttgtctttgtaatttttttgtatattaatttttttttgagacagtgtcttgctctgtcgccaaagctggagtgcagtggtacgatctccactcactgcaacctccgcctcctggcttcaagtgattctcctgtcttagcctcccaagtagctgggactacaggtgggtgccaccacgcctggctaatattttggctttgtatttttagtagagacggggtttcatcatgttagcaggtggtcttggtctcctgacctcgtgatctgcccaccttggcctcccaagtgctgggattataggcatgagccactgtacccggcctgtatattaatattttaatacacagcaagtatgttttttattccaagggattaaaaaaggtgattttagtgatgtcagtacattctgatgccaaaatttatgtttcactgcagccttacacacgtcacactgatgtgggttgctctctagacttgacaatatctaatgttagaagtttaaatatcttgagttgagaaaggcatcaaagaatgatattgtgtattgactctagggaagtaaactcttggattccaatctcaccaatgcctccatctctagaactccatccttcactaaaagtgagtgttgctaataaactgtctcaatgaacacttattgaaaaagagttcacccccctgcttcaccccaccctgctcagtttcctaataaccacgaggaagtatgaggttacacagtctgagggataggaggagaaaacaataggttatgattaaaataaagattcaaatggaaattaaaataaagggaacagacatctgagacatgtaagaaaatgacttagatttctggaggaaagagagagttatttaaaaaacatgcaggagattagcaagaagattccacaggttttccattcatcatcttcatcatcatcatcatcatcatcatcatcaacatcatcatcatcaacatggagcactgcacagtgtttcaagcctcataagtagattcccaaagcatcggtcacgacccactacttttagctgtgcaaccattcaattccttaggctttctaagcctcagtttcctcatctataaaatggggaaaataatagtacctaactcaacaggttttaggagaattaaataagatgatgcacataaactttagcatgatatatgcccacagaacagactctcagtaaattctagtcatcatcaacaccacaaaaaaaatttaaaaactcaaacctgactaccaattttgtgtagtactaggcaatccaaggagagattcatcatctatctcagatcagacatctcgtgaacagtcatttagtaggtggatggatctgaacgatgaactgaactgctttttcatcatgtggaaattgccttcagataaacagggatgattgcatgccccaaagtgtttcttaaattttctacaaaatgccaaagaaaggcacttttttttcttagtaaaacattatagccttggtcactttgagtaattaaagaggttgtttttgttttgtcccctctaccttgcttgaattaaaaaaaaaaaaaaactctaatacaccattcttcttgggcaaactccagccagacagatatttgccattccattattgttttaaagtgttagccccagacacataagcattgttggaatgcaatggaaaaaaaaaaagttttaaatctcaaatggggtaataaactgcagccagaagctaattgtactgaaacttgagcttttataacatgttactactgtagtgggaccactcagcactactttggtggggttgttgtgtaattggtagtagattacgttgcagacatatttaaaaaaaaaaaaaagtcaaatcagacatttctgcttattactgtagacctcagcataattctcaaagaaatcaatgcatttcatccattaaactattgatggggggtattaattcatataatgtttaactactcactgtggacgttctctctgccaactttcttccacccaagaagtcctgaaatgttgctgctcctgtcaaaagaaatgaatcattaataagaaccagcaaggccactggcaagctagaagctgggccatgatatatacaggcttcacattcttttaactgagtgctgaactgtatgtgtaaaaggagaaaacagcccagtagggttttactaagagtctaaaagcaatacaaggaagggtacatccatcaaatctatttattgaatatttaggggatctgagaacacttttttagaatatatattttttagacagtctagagtcaataggaatgaggacttgtaagtaatactccaactaaactctgcacccacaggagggcagggaaaaggaccatacttgtgtgtctaagtcttaaagaaattaggtcaagtctaggtgagagtaggcctactcccaaaaaagtgttgtgataaaaatggaagaaatgcctccttttccaagtcctcatctttgtgctgtgttcatttatttgtattgttatttttttctttctctctccttctgcccctttttatattgagaccacctgcttttatggaactacatatctacttgcggccacaaaatgaagaaatgtggatatcataaaagagacttacatggtcacaaaatcatgagtgttgaagttagatttgaatctaaagcctagttctgccatctcttcttaaaaattattttaccccttgagttttaatgaattacctcataaaatgtggataataatacagatgctcttcaacttacgatggggttctgtcctgataaatgtattgtaagttgaaaatatttcaagtcgagagtgcatttaatatgcctaacctactaaacaccacagtttagcctagcctagcttaaatgtgcttagaacacttaaattagcctataattgggcaacctcatgtaaaacaaagcctactttataataaagtgttgactatctcatgtgatgtattgaatactgtactgaaactgaaaaacagaatggttgtagggtactgaaagcacagtttctactggatgcaaattgcattcacaccattgtaaagtccaaaactcttaagtcagggaccacctgtactgacctcatgaagatttgataaagaataaaaaataatatatgaaattctgagttgagttactggcacagaagatgacagtcagtgttgggtaagttatgactatgataatgaagaaggaaataaagtttacttgtcaattgggatggtcattttagtgaaccaaagtcccaaagcagatttgagatctagatcactaatcactatcacatccttaaaattcactctgtcctatatgtgtgtactttagctacctgctgggcatttcctagactaatgtttaaaaatgatggaagatggccaggcgccgtggctcacgcctgtaattccagcattttgggaagccgaggcgggcggatcatttgcagtcaagaattcaagaccagcctggccaacatggtgaaaccccatctccactaagaatacaaaaaaaaaaaaaaaaaatagctgggtatgatggtgcatgcctgtaatcccagatacttaggagactgaggcaggagaattgcttgaacccgggagacagaggttgcagtgagtcaagatgacgccactgcactccagcctgggcaacagagtgagactctgtcccaaatgaggaagaggggagtaggctcgatctaacgtctagctgagaaagccaatcccatttacgaagcctggaaataacgtttgtaaagcgtaaattatcaccatattttaacagggcttaaaatattctgtcaagcaggctagaacaattccttccatctaattttaaatatattccatagtaaagaaatatgctgtggttagacaaatgtagcattgagcttattactttgtatatgttttctctgtttgaaaacatagtccttatccttagacttatatctgaagaatgtttagaattttataaaacaagaccataatctcgactgatcttcactgtgatcctgtgaggtccttattattattgtcatcaccaatttacagcttaagctcaaagtggattaagcaacttgcccagtgatcacatcattggtgtattgcagaaacacaactacaaccatgatctgcagctactaagtccagaagtatttcactagaggattagaagtggttttatactttcagtgctgaaggccacagatcaacttgagtcagcaacttttaatccaaacctcttagggaagtatatatttactctgaaaatgtttcatatataagtgtctcctgctttcgagtatctttaggctctaatctatttttaaacagacataatataactgatttcttaggtaagtattgttcatcacaaggaagactgtacaagtattccaaatatattgtcattcattcgttcatacaaaaataccgaaaataagcctttactatgtcctaaacactattctaggttctatacacacccagttaaaaaaaataaaaataaaaatcagacaaaagtcgctgctcttttgcagctcacaatctaacttaggggaagatgaaatatataaataagtaccatatacaatttatttagtggtataaagttctatagaagaaaacaaagtgagaaatagaattagggattgctggagtgctactttaaatagcgttatttgggaagacctcactgataaaactatatatgaccagaaacctagaaaaatagctaagtagagtgacctattaggaggcttctgcagtattttgggtgagagatgatgatggcttggaacaaaggaggggtcagtttagatagagagaagtggtagaatataaatacatttggaagacagagccaacaggattcgttaacaaattaaatatggagtttgagaaaaaggcagaatatttggcctaaactctgataggtgagtgtgaacctattaaggtagtgaagacagagataggactaggtttgggagggaaagttaggtgttcagtatcagacatactacattttaggtgtcaattggataccctatggaagagtcttatatgcaggcagataattctggagtttagagaagaggtcctggttggagattaaaaaaaacagagaactgtctgtgtatgcaacacatttaaagccatgaaatttaatgacttctagggagtgtgaatagataaagacagggctcacagatggaccctgggacattcataagcttagaaattggaaagaagtagagcaaccagaaaaaaagactgagataaagaccagaagccttttgcttaaatacgtagaggatatttttgaatcagagattatgtgtagaacccttaaactttacctctgatccttaattttatttattcttccgtatcatgccctttaaaaacagtgacataattccacattcccttatctttacctttctttttattaattaactgtttatttattttgagacagggtctcactctgtcatcaaggctggaatggagtggcgtgatttcagctcattgcaacctccacctcctgggctcaagcaatcctcccacctcgacctcccaagtagatgggaccataggtgcacgccaccacacccaaccaattttttgtatttttggtaaacacggggttttgccatgttgcccaggctggtctccaactcctgagctcaagtggtccacctacctcggcctcacaaagtgctaggattacaggcatgagccaccacgccgcgcctggcctctacctttcctaagtgatctctccttttgcctgaaatctcttgatactgtaatgagaattccttgaaggcatggaagagatttcactgagctctgtctactccccccaggtcctgctcaaggtgtttgtaagatgcatgagagtgtacaaatcaactgcttaaattcagagattacatctgcattatgactttatgaatcctgctcctaacgtcaaatgtgagtggaaaaagtttgccagttcttcaaaaagctaaaattttcataagacccagaaattttactgctaggaatatatactaaagaattgaatgctggccctcaaaaaatacttgtatacaaatgtttatactggtactgttcacaataaccaaaggtagaagatgccaaaaaatcataatgagaaaaagaagagtctcttcaataaacagtgttgggaaattaggtatctacatgcagaagaataacattagattttcatctcacaccacacacaaaactcaacatagattaaagctttagatgtaagatctgaaactataaaactaccagatgaaaacaggggaaaagcttcatgacattgggctaggcaatggttttttggatatgactccaaaagcacaggcaacaaaagcacaaatagacaatggaattacacaaaactaaaaagcttctgcacagccaaaggaacaacagaattaagagacaatcttgaagggaagaaaatatttgcaaaccatacatctgataagaagttaatgcccaaaacatacaaaggaactcaagcaactcaagaaaacaacccagttaaaaaccagataaagaacctaaacagacattttccaaaagaagacaaataaccaacaggcatatgaaaaaaatactcaacatcactaatcattagggaaaggcaaattaaaactacaatgagataacacctgacacatgttagaatggctgttaccaaaaagacaaatggtaagaagtgttagcgaggatgtggagaaaagggaacacttgcacactgtaggtggtaatgtaaattagtgcagcgattatggaaaacagtatggtcatttctcagtaaattagaaacagagctaccatatgattcaacaatctcactactggctatacattaaaaaatgaaatcagtttgtcagagagatatctgcattgccatgttcattacagcatcatttacaatggccaagatatggaaccaacctaaatgactgtcagtagatgaatgggtaaagaaaaagtgctatatacacagtggaatactaggcagccttaaaaaaaaattcctgtcgtttatgacaacatggatgagcccagagggcattaagttgagtgaaataagccaggcacagaaagacagataccacatgatctaacttatatatgaaacctaaaaatgttgtgaactcatagaagcagaggatagaatggtggttatgaggggcttggagggtggtggtgggaggcattgggaagacgttggtcaaaggatacaaaatttcagttagaaaagaggggtaagtttaagagatctattgtacaacatgatgactataattaatagcaaagtattgtatactctaaagttgctaaaagagtagattttaagtgtgcccaccacaaaagaaatctgaagtatatgaataatggttatgtgaattagcttcatatagtcattccacaatgtacacgtatgtcaaaacatcatggtgtacaccatatgcacaatatttgtcaattttaaaaagattaatttaaaagagtttttgtattattcatattccacaaatgtaaaaatttttatttaacacttacaaaatatacataacaattacattttatgtaaaacataaaaaatgcaaaatgtgttttaatgatttagcaatggggataatacgcatgcatatgtacataaacatatagatatcatctgttaaactacctgtgtatgcgtaccgtatatatgcctatgtttatatatatgtatatcataagcatatgcgtcatacatgcatatatacaggtgtgcctatatatgcacatgtatatctatattttttaacacatttatatgtgtatatgcatatttacacatacatatattgtatgcatattcatatatatgaatgcctatatccccataaatatgtatacatattttttttgaaccatttgaaaataagttataaacatattacccctttactcatgtacatggtatgcatttcctataatcagggacattctattgtaataccacatacaatcattaaaatcagcatattagtatcaatagtactaaaacctaatctatacctcttttcatatttcattacttgtactaatatgctttttagtaaaataagaaacattgagttaaaacttatgaaatgtaatagaatgggtagctgaaaatttttggactttctcttgtatctaggtcgttgtattttcaaacactgagataatatattatgcaacatgcctggggtggatgaagaatggattcaggaattaaattcattcagttacttaatcccaaatgtgggtgcttttacattgtgaaactattaatcactctaagaatagaaggagggccaaaaaaacgattgtaaagtcctgaatatctttcagcctaaaaagtgttctctgttgactttttctttgatcatgaaaatctacaagcaaccataaaattttactggagttataattatttgaaactttcatggtgtctctaaaacactttataatagcctcaagtatcataagttgatattatttctacttttccacttataatgaaaataagaattgtgacttttattcatcatttccacatgaaaaaacagtagaaaaaaatggtgtgtttattcaccttgaaaatgcccagctggggtttattaaccacacttcagctactcatctttgtgatgctcaaatatagataagataaaatcacaaagacctcccagatgacaagtccagcaaggtcattagatcagagggaagctgagtattctgtgactgttttatagtcaacaacaaagtatttatgttcacgatgtaagttatttgagtattttagcaaattgaaacctacagccagttttacaccaccatctatgatctgattggcatattctctcaatagggggtaccaatactgcaaactcatgttcacaaaagccttacataatgagattttctacagacacacacacacacacacacacacacacacacacacagagatatacatgcacaaatatattcaatccttaaataaggcttactcatttatctatctatctatctatctatctatctatctatctatctatctatctatctatctatgtgtccatctttatagtctgctctaagcaacagaaatgaatcataccctttgtaaagacagggacccaaaagagcgtactgtgtctttcaccatatggcactcacagtctagttgggatcactggactgtaaagagaggaaccacaagccaacatcaatagttctttaacacagatctgaactgagtgtcatggggtcatgaagaagagcctgggtgaaactgcctggatttatctagaaaagtgtcacagagaagggaatatctggactgtgaaatcttgatggctgaacaagagtatcttagggaaaaagtattgggagggacatttataaacagaagaaaatatatatatatatatatacacacacacacacactcagagatatacatacacacatctgtatgtaaatatatagatgtgtagtatgtgtgtatgtaatatataggtaaaggtgatggtataggtaaaagataatggtggctagtccatacaaacaaaatacattttaggggttcaggaaaactacaggatccagagtacaagataaatgaaatcaaattctttctgatttcatggcttcctctgggaagcggtgggtaacagccacaaccccttcaaaagggaattttaaagaatattggatgcatcagctgccatactctgtatcacatccctcattacactggtcaaagttgattgtaaaacaaatggacatcacaccccaaaatgattaagcactaaatgggaaggtggtccactaattggcctagcaaagcaaattgacccatcctacatgatgatgggtgaatcactttgagtctttcagcttcttttttgttctgctgtcagtctttcatccctctgtacagagtctggtcagagacaaaacataaaccagaagcgatgtgatggagagataagagtgatatattttatagcagactataaaaatagatagtgagtaagccttatttatttaaggattgaatatatttgtgcatgtatatctgtgtgtgtgtgtgtgtgtgtgtgtgtagaaaatctcattataaaaggcttttgtgaacatgtgtttgcagtactggtatcccctattgagagaatatgccaattagctaagagggatgtaaaagctatggagtgagtattttcctggctttgtcgcccatgactcctcattcagccccttctacccacacctgaccatgctgggcccgaactttctttggactccacactcgctctccccactgcctgcatggtgaatttcctccacttcatcaggtctttttggcaacgttaccatctcagggaatcctcagtgaagtgagacacctcttgtcatcctgtctaaagttctacccttcgcagatttcgaagtcccctttcctgcccccttcatttttccttagcttgtatcactatggaacataccacatctcattctccatccctgttttgttttgcctctattttgcattagaaagtaagctctgtgggtgcagaatatgaatctgctgtgttcatggctctattctgtgttcactgttcgttgcctaaattaggtccaggaatctggttagcacttgggaaagttattcgtcatccctaacttcccctgatgcattttttttttttttttttttttttttttttgagacagattctcattctgtcattcaggctagagtgcagtggcatgataacagctcactgcaacctcgaactcctgggctcaagcaatcctcccacctcagcctcccaagtagctgggactataggcgtgtgccaccatgccgtctaatttaattattattatttttgtagacacgaggtcctgacatattgtccaggctgacctccaactcctgacctcaagtgatcctcctgcttcagtttctgaaagtgctgggattacccggacacagattcatcttctactcttctgctttgctctgtgccctgggaggtagactcctttggactggatcccttgtcaaataggttctgggtgcttccagccaatgggaggtactgtgaagtgagtgtagggagggaggagagagaggttgtggtatttctctgccccatcattgcttccgttcatctcgagcagtagctgcattcctccacaattcctgccaggtattctgttcatctggggttgcagctctaacttggctcgaataaaagcaattcttcctttaattccttccaccctggaggtgtaatggcttcctgctgctcctaatctctaagcactgcatcctctctagatttatacttgtaaccctatctacatatcattaagtagacccttcgttaaaatctcttcatttgtaccatctgcaatgagttctctttcctgccaggactctgactgattaaaaaaaaaaaaaaaaaaactcaataaagacttgttgaaaggctgctgaatgaatgaaaagtcttggcatcctttggaaatttgactgattgactttggcactggaacagccatggaagagacactaaaggaggaaaggctagaagtcagcaccaagaagataactctggtatgccttgccaatcctcgactgtgtgtatatgtgtgtatgtaacgcaatagccactggttaaggagtgattaattcagtccaccagcaaactacttgtcttcattatgcccattgatttgtcttgttattttgtgtttaggttgaatacttttatttttttatttgtactttttttttttttcagagtctcactctgtacccaggctggagtgcactggagcaatcatagctcactgcagcctcgacttcccaggttcaagcaatcttcctgcctcagcctcccaagaagctgggagtacagatacatgccaccgcgcccagctaattttttttttatttttattttttgtagagatgggggtctcactctattacccaggctggtctcgaactcctgggctcaaacaatctatccatcttgacctcccaaaactctgggattataagaatgagccaccatgcccaggggttgaatacttttctgctggtaaaatatggtgcttgaaacagagcagaatgccggtatgattgtgcttgtatgtgaggtggcagagtaaggaaagcatttaaatcattgttgaattctaactttctactgattaacttgcctagcttttctgagcttactcatctagaaaattgacagaaactccatggagaagttataaatacatataaagatatgacttatgtaaagtgcttaccacggtgcacgacatagtatttgctcaataaatgttcatttctctcctgtttttctctcctgtttcattttctttgtctctcttctttcttattgaagttccacaaataaactgggatcagagtgatttgcttctgctaattttttaaatttcctcaaatatgtaaaaagtctttgcaatactattctaggttaggaaaaataagggatttataacttcaggaatttcagctataacagaagtttacaagaaacagagggaatcagagacagactctgaattgtcattctcccaagatgagacctccagaaaggtatgctccacgcagtgcaatcaacttggtatgcctgattgcttggcaagttaagcaatattccacaggcattagagttacataccatgggctcaaaatggatcccatttcaagatatcgaacaagggaaacttggctgcttttctttgccataggggaaaatagagaggccatcttgagacattattggtataaaattgttacttacagcttttaaaatttaccactctaggtgcatgttaagacatacagacatattttcactccaacatacacctttcttgtcttcttttttttcctttggttagcttataaagcaaagaacattctatagaggtaggggagcattccagttttctattccaaaaaatttgacacactacaggatagaataacagatctggatgcattttcaaagaaaatgctgtttaggaacatacaaaacccatatgtcctttcactgcaagacagtctgcaacaagatcatggtatgtgtgcactgagttgattttcttgtgctccttgtgtactttttgggctaaagcaaagggaatcatccaacacattataaagctgcaatgatcaccatctatattgttaatgatagctgtcaaatgaggctgatgtgattgtggagacaaaaccagccctgaagtgtaaagaccagaggggtggcaataagatatttaaatcacacacagaacaaaacaaaaatattagcatgtctcacattaacacctttgcttgggtcttgcagaaatgtttgccacgctaacccaaacttgtgtctttaaatcctgccctatgctgccttcatttgtcaaatgctcatattgcgctagtcagcataatattatcttcttcttgagcactaattcctaactccagggagaatcaatgtctgtacagatatattggaagcccctctagctttttattgcactcatcaatttacatgattcttatcatttaaccaaactgtaagccacgggaaggcaggaaccatgccaagttatcgcgacgtcttccacctctactaatgccttacatatagtagatgttcagagaactaatctaccatgactgaaacaaacactccacagagttttggtttttgacttttgtttctgtttttgttttccagtagcaggatgtttggatttgtggagacactagctggatttaaggttgtgttctgtgaaatttatctcaggagcatactcggagggttcagtgtaaacttcaaatcaatgttcgtcacattctttagaggatctcacttctgtgcaaaagtgctacacgtgagggtgccaacaaaattaataaattagtgtctcagatttttggagtagctctaaatatatgacctttttcttaagggaaaagccctacctgctggtggggttaagaaatggtcacaatgataacctacttattgtctttcttgtcactgtagttatccctgactggtgggcaatatttaccgatgccctggcagccatatcttcctgttaatattctggccgggtgtggtggctcatgccataatcccagcactttgggaggccaaggcaggcaggtcacttgagatcaggagttcgagaccagcctggccaacagggtgaaaccccgtctctactaaaaacacaaaaaattggccaggcatggtggtagtcagtccaagctactcgggaggctgaggtagaagaattccttgaacctggaaagtggaggttgcagtgagccaagattacatcaccacactccagcctggatgacagagcgagattctgtacaaaaataaaaaaataaaatattctataaattcaaaaataaatttgaagatataagccacattataataattaaagttgctatgttctcacaatgccaaattatcaaatcttttggattttattccctaaacgactttcaatccattactttcttctatattgctcctaggcctagtcaccagtgcttctcacctggacaactagacacccttagcaggtcccatctcaatctctactgcctcttcaatccccttgtccatactttagatggaatgattttttttttttttttttgagacaggatttcgctccttagcccaggctgaagtgccgtggtataagctcgacccactgcagccttgacttcttgggctcaggtgatcctcccatctcccaagtagctgggactccaggcacatgccaccacagcccactaatttttttagagatgaggtctcactatgttcaagctggtttcaaactcctgaactcaagtgatccccctactccagcctcccaaagtgctgggattacaggcatgagaccccatacctggcccagaatgatcttttgaaataaaggtaagtctcataatgtcacctcacctctgctcctgtacctacttcatttcatttactttaaaatatttagtggctttgtagaccccaattcctgactcactttacaatgctctgtgtatataatctgcctccccagccttctctcctgccaaaaccctcctcatttgctgtgttctaggcataccaactcctaaactttcacatacatcatcatcatcggggaagcttagcaaaacagattcctgcgccctagaccccaggcagtctcattcagtaagtctgggatgggacctaagaattcgcaaaggacaagtcccaggtgatgctgaggctgctccagggattgcgctttgggaaatacatggcttcgacctctgctaactcttttttccagagaatcctttacaacctgcctgagcaggatccagatccctgctttatcccatcacaggtcaccatgtaagtctgacgcagcttctatgaccgccataatattgcctttgtgtgatcatttggttatctctacccccagatgtcagtataagtaccataagtagctcactatgtttaaatcagattccctttattgggatcctctaaagaatattcatacaggacaaaataattttaaatattgggtaattatggagaagcccatctacacatctttccccaaaactattgtcatcaatctttaagatccattacttgttcatttggcaaaatatcatgacatgtttctctgtgcccgcatagcagatgccagtcaatgtcctgctcactcacattcctgtgttcttattatttcagtgaatgctgtcaacatcaaactgccaaatcctgcttcccttctctccatgggccttggctttgtcttgcacccaaagcacattttgccacctaactggtagaagtaattgactttgattatcatgaagaaataacattataaaatggaaccaggagcacatatagaactcaggacactcactgaacgtatcctgctgattccatgcctggctatactttagacagaatgattttgttgcattcttgcaattgcaagaatgtacgattgcagcagttacagcgcgacaagggcaaagcgaccaaaggttcagacctttcgatctcccgtggtaaaggtctcagccttctacttggcaaggcatcctagactagcggaaatggacaaggatgagggatgtctagaatgggtagaaaagagagaagaaaaggaatattgatggcagccttgaaaccaacttgaagcagataatggtttctctcactatccctcctgttgtatgttatttaatcatttaataaacactgtctgtccaccaccttgaaaaatcaatacaggatagaatgaaattaacacagggcatgcagagatctgagcaggtggattttagtggatgactttagtgccccatcaacatctcaccttccttaccacttcagtgcagctgccggcacctgcacttctttgagggtttttcttgctgtagagactgctttgctgccagcatggcaaactgcagtagagaattaaaaacccctagaagcagctctcaatgtaagtgattggagtttgtctatgatttccctcggtgacctcaccctccttggggagtgactctaagtcatgtggttttattaatttgatctgaaactccgattcctagagttttccccataggattaatctctgtgtacccacacttgttactggcttggcaatgcactctttcttggctgctttcccttccttgtctttcttccttactcccccatggatgttttctttcaccctccaaataaaataattttattcaaatctttgagttagtttctactcctggggaacccaaacttatgtagtctggggcttgtcatcaggtcatactgttggctgttgcccaggaaatggtgtagatctggactttaggtcaatgaccttcccagaaaatatggacagaaagacataatactcataactttagtggcagaaatccacatccctactctctttcaaggccacctgtgaattgcgttgtcaggcttcagcaggtgatttttgggtttctggcatattacctagatccttatgagacataatagattatagaaaagaaggcctggcatggtggcttatgcctgtaatcccagcactttgggaggctgaggagggtggatcacctgaggtcaggagtttgagaccaggctggccaacatgggaaaacccagtctctactaaaaatacaaaaattagctgggtgtggtggcgggcaactgtagtcccagctactcaggaggctgaggcaggagaatcgctttaacctgggagttggaggttgcagtgagccaatgtcatgccactgcactccagcctgggtgacagagtgagactccatctcaaaaaagaaaagaaaagaaaatagtcatgctcttgtcaggtgattgcctcacaatgcaggtggcaatgggacagaaagcattattattttttttccttcttagatttttttttcaaatgctgactctttcttaaaatttcccaatgcagtttatgacattctctagttgtaaatttattcttttgttattttaaaggacaatatgtattgatacaggaattagatcaatcaactatagcaataaactcagtttatatcattttcttggagttaagatacatatttcagaccttaaatcctataatcagtattaagtgctaagggtgtacacctgactcaaattgaaacaatccacttttctcctccataaattctgagttgggatttaaaagagtttgtcaatgaaatgggaagctcaactgggacactgaaatggagagcttgcctgagaagattctatttaattctatgcaagttcaagaaaagaaagctagaaatcctagaaacctgaggaggagaagaataaaccccagctgtaagagacacagaaagaagagatagtgcaaggagagcttcgaagaaagtaatcttgtctttaataatttcttggtaccaactttcagcttttttatgaggtcctgtttttctttcttttggatctatagctactcctgtaccttagaacaattttccctttttggtgttaagattacttgagggatttttcaatgatttaaaaccagaacagccttggtgaaaagaactgcactctactccaagttcaagaagaatgaagaccatcattttcttggttttcagtgcacctaacacaatacttggcacataatagactctcaataagcatttgccaggaaaaaaaaaagaagtaaaaatgttaaatagcttcagcaaaagcaccaagaagcatgtgcacattttataatgtggaaagtctttctaccaatagaaagcggctgacctgggttcagccatggacagggctggaatgctcatgcattaggtttattttaatcagtaattgcccactcatttaatccatctgaaaaatagtcttaaccgctgctcaaattattggtgtgtatttctccaggatatgtagtgaggtattaattcaccttgaaacatttaggcctctttatcactctcagatgtttaaagtggctcagcagaagaaagggatgaagtggagtttagaatgggtaaaccagagaaatgagctctcaatctctggcaaatccagcacttcatcaaaccctatgggaagagcagagtgttgtgggttgttgtttcttgaaatgttcattaaggaaagaccaaacttagcaaatgctgaagtccctcttgtaatgttttatgattgttatagtatttggtaacttctgttcccctctggctgtgatgtgagaggttcctcccaccacatcccccccatgacagcaatctctagctgtaaaatagtaagaccgtcagccagcaataatttgcaatccaaacagacttgacgctccctgacatttattgaaacctcagaccctgtgcactggtttcagttttcctcccttcgctctgtttttacagacagacaagtgcttagatttaggcttaataatgaggagaaatttcttcttggcctactcttgcttgtgttggctgcactggggcttgcaacagatgggtggttggagttaattatactaaatggtgagaacattatttgaccccactggttcagccccagaggctgtgtgcctcctcacagacacaggcagatggaatgcctcacaggctgggcaaagggcagaagccatggaaagagagagctcttcccttaagagcagacagacatgagtttcactccttgacatagctcagaatcctgggctcttttatacatataaaccagtaaagtgcaaagaaacacaaggtggtaacaaggattaggaaaacacactttaactgatgggatgactctccaagggaccagccatcttccaaaatgataggtttcatccttttttccaggaaagaataatagaaaagcttcaccacacaggtgtctctgacaagcccaaaaggaattcttatcacatgtgtcgtcattgtaggagacttggtgacaaccatattataattatatttgagaacccagtggtaactgcatattatttaactcagtacataatatgtagtcccctgtgaatagtcttgtccttgctatttttaatgatgatggtgacaataagaatacacccatgttcttgtttttctagagataacctggcattcatgagtctcaagatgaaaaattgaccaatatacctaggtacagtggagatttatttataaatagtttgttggtacatcacaacacaacttccagtgtactaaattatatctcattctagagtataacaaggccagggagatacaatattaacttgttgacttaataccgacagcaagatttctgttcctagatttgtgcttcactgttgtatgtcaattccatgcagataattcagtatgtcctggaagtctgtaggcagtaatggcttatatgatctgtctggcaatattgactccataaaatagcattgtgtaccaccatgtttgcattgtcaaataatttctgctctgacacagtttatgaaacacaccaagttaataggagaggtaagagatgagtagcagcccctaagatgtttcccactcttatctaagaggcaacagtctttgttgttctttttccttactttaacatctttctttctgtactatggtgactatcatcttacccttgtttatccagggtcaaaaatgatcaatgaaaaatgaagcaatattataccccaacataccaagaatttcttggtaatgtttcagaaaacaatggccaaggattagattttacttggagtaacagcctaactgcatccctttcaaagcaatttgattcattttgttcaataatcacactctatcactctatttcttctcaactaatacgtactaaattgtcattacattatatgggcaagcatacattgttagtacaactcacttccacctctgtataaacgactcaaagcgtatgtaccttgtgaatcagtagcatctttctcacagaagcagaatatgattgcaagtgttatgttcatatcttgaatgagaaaggatacagaaattaccctgtggtatttaaacctcataaaacaaatactgctgtgcataaaaggaataggttttgcaaaatgtttatacaaaacaagtgtacactgcatattttccccagtaaaatataattaagtagtaggatgtgcttctaaagtgcagagccaatgacatttaagagtttaaatattatattatcacctatatgaaaatatggggcaaatatagacataaactatacttaaaagacttaaaatttttttaaattataccttaagttctggggtacatatgcagaacgtgcagtgttgttacataggtatacgcatgccatggtggtttgctgtacccatcaacccatcacctacattagttatttctcctaatgctatccctcccctagcccccaacccctcaacaggccctggtgtgtctttccctccctgtgtccatgtgttctcactgttcaactcccatttatgagtgagaacatgtggtgtttggttttctgttcttgtgttagtttgctgagaaaggtggtttccagcttcatccatgtccctgcaaaggacatgaactcatctttttttatggctgcatagtattccatggtgtatatgtgccacattttctttatccagtctatcactgatggacatttggattggttccaagtctttgctattgtgaataatgccgcaataaacatacatgtgcatgtatctttacagtagaatgatttatggtgtttattgaggtgaccgctttcagaactaaaatgatagtagctgaattatagactttattgcaacagaatctgtgagattgaagctgtgcataagagaaattcaggactgaacaataagtaagaagtgaagttaggcaacaagaagacaggggcaaagataaataaaacaaatgctattttaagcccaagacaaggatttcagagaagagttggagacagacacttttctcagtatttactagttgcatacatgcatctttgcagaaaggatctgtaacacttcctaaaaactcagcgctaaatctgactgttcaaggtttttgttactgttgttgttgtttgcttcattttagtttgtgtgcttgtttttttttaagtatttttatttatttatttcatgagagggactctcactttgtcacccaggctagagggcagtggtgcagtctcagctcactgcaacctccatctctcaggttcaagcaattctcctgtctcagcttccccagtagttggggttgcaggcgtgtgccaccaagcctggctaatagttttgtattttgagtagagacagagtttcaccatgttggccaggctggtctcaaactcctgactttagatgatccacccaccttggccttccaaagtgctgggattacaggtgtgaggatcacgcccagccacttattgtttatttcccacaagaagttgtaggggagagttgttcacggtagaggaagcagtgtgagaaaggctgtaagcatgaaagatctcagtcccttcaggaaacatgagtgtgactggagtctctggtgcagggctgagggctagacagagccagatattagagtcgtaaggaccgtgctgagaacttgccatttattctgtgtgcagcaaagaggcatggagtagtttatgtaagaacacagcatggtcacctggcgttttagagaggtcacaagagcaacgtcatgaaggatggattgatggtgaaacgagtcagagggaacagccggtgagaacacagatctgtttataataagtctgttttataataacattgcacattttgatttgcttctctagggagatataggttatataagaacatagattagagtttagtagaacggaagctgattcctggctttgatatttattagctgtaggatacctggtcttcattctagatctataagtatagatcagtataggtctgatcttcaggcttccacctcagtttagaccctccttcaaggcctggcaatacacaaggccgtgaaggagggtctaaactaaggtggacaccgcagagaaacacagcaactggaaaaattggcaagttttaactgctaaaaaatcacagtggagggagaaaggaaaaacccaccatgattttcaggtttgtgacttgagtcagagtggctggcagcttcataaatggagataaaatatacgaaagaagaaacagatcctaaggaaaaacaagtctgtgttaagagttggatagaatgagtttgaagttcctacagtactgaagatcagtatcatccatctaataaacatcaaagccaggaatcagcctcagctctattgaaccctaacctatgttcttcttacataatctacatctccctagagaagtaaaccaaaatgtgcaacgttatgataaaacaggtatgagatagatatgtagagaggcaagagttaattggatatattccgaggcaggctattatcagtttgtttttgctatataagagcctttctctcatattacagaaatagctacacctgtgaaataacatcttcactaacaatttgtaatcaaggcagatggacttagactctcagccaggtgttgaaattctttccgtcgcccaacacagagccgaatgcaagaaacaaagattcctgagggtaacatggatgaaaatgatgttaataaaaagcaatggaaagagaaggatgcacccaccagattcaagtattcatttatctggctgaattgcattcttaatactgtctcatttttaagcaaatggattttatcttcttaaaaatgatctgttgcaatgcaaactttcttatcttttcaaagataagatttaatgaagacatagacttcaacactggaaatttaaacgagttttaaatgaagatgtagacttcaacagtagaagaaacatattagttagaattttcagaagcaaaataggctgaaagatttatgatagcacttagaaacacgagccttcagactgcgtgcccaagcatgaccaaagagcaggcaataacagatctcattagacgctgtttatttaatttaacattatcctgtcagggatggtttccctgttcgatagagctcatttttttttttttgatagtttaagtaatgctcaaatatacaagaatatgttcatagtaagagaaggctacgcatgcaaattcagaaaatcatcaaatcatccccaaaactatagttttaggttttctgaatctgttctcttctttcccaagagctatgaaacaagacttacatactagctcagaaagaaccctagaaagggaatctactttggaggagattaaatctccttattatttttccaccctcgtatttattttcttttttctcttcaaatgctaccacaacaaaatgatctgtcttttttttcttgtagtacctgattaatgttccaaagaatcacatgtttgcatttgaggttaaagcaaacctctagatagagctgtagagaacatgatatgccgatgttaatagtttcctatagaaacaattatttttgaatattcaggtgataaaaataaaagatcaccttagaagcgacacactatatatatgcccatttaattttctcctatacaactcccatcttcatcacaaaaaaattttaaaactgccacattacttaggtttatatatatttaaaataaaactaacaactcactgagaaaatataatttcaccttagtaaagtatgaaattttattagacattattaaagctgcaatggccaaaacaaggaattaaattttcctctgtaatgttaatatctccagcatgaacgtggaggtaataatacaaatcactggactgaaaatattgctgattaaaacttctgagaacaaggctgatagattggcagttttcacaaacaccttcacgtattaagacaataaattgccataatgtgttttgacgttgataatgtgatctaaaatcttttcagaaaagatgtcttccgggaacaaagattcactatccctttgttcaggtggctcaaaataattgcatcagattcaaggctcggctcgggtattaagttatcctaaactggagaaccgaagtttcttaaactcggccaggcgccgagattaaaaattgtcagtagagcatggaaggcgatcaggaaagccttgaggacatttagaccatgcagaaaaggtccatagattgacctcatttcaacaccattgcttatacatgtaggtgagacagtaaggttttaaaaatctccattattttctgggaactttgaaccaaggatgcagatgtctgcttactctttccaacttcgtggtgtcctctgatgccattgaccttccaatcaaacagcactgagacttcccactcatttctggctcatctttgtttccatcctctatgttttattaaagtgccaggtactaaatgctttagggttgatggacagtacagtgtctgtcacagcactcaactctgctattgtagcatggaagtagccatagacaatatgtaaataaatgaatatgacagtgtcccaataaaaccgtatttacaaaaacagacacaggtaaattttgtccaagcgtctgtactattgccaactgctgagctagagcatcaacttttcccatacctggtgttataccccacctaacccctccctacttccaacctgtaccgttctattcctttagcccctttcagtttttgattctcttcagtcaaagcttccccgatcatgctgtcataggaatcttctttaagtgaaactcacttgtttcacttaaagtgagtttcccattgggaaaaccatactatgagtttcaattgtctataaacctaagttttccagtccttgcagaatacagtgttaacctgctttcatgcctcagggcccatacttaaggatgagacctgttctccaaattgtcctgctccttcttgcaactattcattaccttatactttcctttctgcttggaatggtcacctccctatcttccaggtcaaaattctatttctagtagaaagccttcatttccttatcaactactcacaacttgcccttctattgtttacaggggagagtttaagttataggtatagaggaaaccaccaaagaaatagagattaaaaaagagtcaatagcagaattctggaaattatttatactcaggggacaaaagacagatcagcctaagagacaacaaaaagcactgggaaaaacaggagaactaaggaagcacttcatgataaattaacataaagataaatcatcaggtgttatatttaagtatcatttcattaaataaatgtatcataatatactgagtttaagatattcttttttttttaattttttatttatttatttattctttttgagatgaaatcttgctctgttgccaggctggagtgcagtggctcgacctcggctcactgcaacctccacctcctgggttcaagtgattctcctgcctcagcctcccaagtagctgggactacaggcacacaccaccatgcccagctaatttttgtctttttagtagagatggggtttcaccatgttggccaggctggtctcgatctcctgacctcgtgacccgccctcctcggcctcccaaagtgctgagattacaggtgttgagccaccgtgcctggccaagtttaagaaactcttcaaaaaaaaaaaaattacatctattttattaaaataaaatccaaccagctgggcatgttttttcttaccttggacttttcccttaccagtaaattatagatatatttacagatcaatgcatacagatttgatatgttcttttaataattacaaaagtctttactttaaaaaatcataaaaatattcaaatattagcaatttaagtttttttaaatttgttactgttgtaaacaacaatgtgaataaaaagtctatctatgcagcaaatttttgaataattacttactgacttccatgtgtcgggcactatacagtcatgtatatataattgacagttcttcttagtaagctgttacctggaaataacccctgaagatgggctttccctccaatgcctaaagttacagtaacaatgggactatttcaccacaggtttgactcatgcttaagaactcagaggtgaagataccaacagacttatcctgtgggaaagtaaggaaattacagtgtcgagaaaaagacccaggagattattatcctgatatgttaatcttctggttttggatgctccagggcagaattagaggacacatgtatgttcaactggttttcagttgtactcagtattatttgcagaatataaaaagatagcatcgtctacatcagagagaaaaatctcagctccacagctttttaagatgaaatgcttcaggaaatgaaacaggactgatttgcaaatggatattattgatttatcttacagatatgtcgatgccttgattatcctggtgttacacattgcatagtgccagtgatggagaaaaacgttagacatgaaaatcattccaataatagtggaaagcttatccaaattagacagatcactaaacagatctcaggtaatagaggtctaaagtgaaaaggcacagagagaaataaattacagcaaaaatgacagcagaaagctttataaataggaggaattctcttgacttctctttggtggccacatttgcctcttttctagatttaaagtttgactgtaaatggatggcactgagagccaaagtcttcagctctctaaagaatttgaataaaaaaggatgagttcatgtcctttgtagggacatggatgaagatggaaaccatcattctgagcaaactatcacaaggacagaaaaccaaacactgcatattctcactcataggtgggaattgaacaatgagaacacttggacacagggtggggaacatcactcaccggagcctgtcgtggggtggagggatgggggagggatagtattaggagatatacctaatgtaaatgacaagttaatggatgcagcaaaccaacatggcacatgtatacatatataacaaacctgcacgttgtgcacatgtaccttacgacttaaagtataattttaaaaagaatttgaataagtataatgaatgtaattgttaacacctgaattcaatcccttcaactgtcactagaagaaaaaatgcataaagacatgggtggaaattcattcttttaagctgagaatggccctatgttcaagtgggaacacaaataaaagttgccttactgtggtagcaggtacaatccagaaatattttatatcaacgagtgaaaatgatcagctgcaagaggggtgcacgatacgggtgatgggtgtgagggcatggccacttgaaggggcagcatctcctcagtccttgcagattgctaccagggaagcatgcaggatcagtgtgccagatctgacactcagggaaagaggaattgccagatgtataatagatgatctaagacttggtagctacaaaagacttggtagctagtagtctgtttatttttgctagaaatgaagttgtttcattaagtcagctgaaatcaggggctctaacttccatgatgaattattggtatttagatgactatattactttatttccccaaatctaagttttgttgtttttttttgttgttgttgtttttgttttttgtttgtttgttttctaagatggagtcttgctctgttgccgaggctggagtgcgatgacacagtctaagctcattgcaacctccgcctcccaggttcaagcaattcctctgcctcagcctaccaactcgctgggattacaggtgcgcaccaccacacccggctaatttttgtatttttagtagagatggggtttcaccatgttggccaggctggtctcaaacccctgacctcatgatccacccaccttggcctcccaaagtgctgggattacagacgtgagccactgcgcccggccaccaaatcaaagtattcctataaattaaaacagaaatattttttaaagaagaggaaaacttctaaaacctcatggggctgcaataattaactgaatgagaacgtcatatgtattagtcagctcagacaattaacaacataccatagaccaggtggcttaaacaacagaaacttactttttcacaattctggaagccaaaagtctgagatgaggctgcctgcacagtcaggttctgtggagggctctctcttcctggcttgcagtggccaccttcttgctatgtgctcacatggcttttcttcagtacagtgcaacagagagacacagagagaaatatctcttttcctcttcccataaggacactaatcctattggattaagattttgcccttattgtcacatttaaacttcattaccctctaaaagccttatgtccaaatacagtctcattaaatcagggattgaatatatgaatttagggtagggggagcaatttagtccatagaaccatgtgagcatcaaagactcactggacttacgtccgtttgtaagtgtctcctgttgtagtgtatctgagtcatagagatgtcagctaaagaacacagataatggagtatgttgcatacaaaaactgcaaaatagctggttctccatttactaatagctggaagaggtcattcaacttccttttgcagaaaacaaatagaagattggaaaaaaatattaaaaattaaccttatcaggacactggaaaacacccaaaggacatgaaaactgctagagtattgtagagaaaagaaagaaaggaaggaagaaaagaaagaaaatagcaagagaagggaaaaaaagaaagaaaggaggaaaggaaggaaggaaaagaaaaaagggagaaagagagggagcaagaaagggagggaagaaggaaaggaagaaaggaaagaaggaaggaaggaagataacagcacaataaacttgtgagcttcttgcttagggtatcttggggtatttctatgaaaatttccctggccagaggtggtaaagttggttttgggtaggtttcagagcaaagaaaaaacaaacaaccacattaaaaaatgggcaaaggacatggacacttctttaaataaagcatgcacatggccaataaacatgaaaaaatgctcatcaccactgatcatcagagaaatgcagatcaaaaccacaatgagataccatctcataccagtcagaatggctattactaagaagtcaaaagaacaatagatgctgatggggctgcagaggaaagggaatgcttatacactgttggtgggaatgtaaattagttcagcctgtaaaagcctttcactgtggaaagcagtttgcagatttctcaaagaaccgaaatcagagctaccattcaactcagcaatcccattctgggtatatatccaaaagaaaacaaattgttctaccaaaaagacacatgaactcaaatgttcattggaacactattcacaatagcaaagacatggattcaacctaggtgcccatcaatggtagactggctaaaggaactgtgattacttcatggaatactacacagccacaaaaagaataagatcatgccttttgcagcaatacggatggaggtggaggcaacaattctaagtgaattaacacaggaacagaaaagcaaatactacatattctcacttataactgggagctaagcattcagcacacagggacataaacacgggaatagcagacactgcgaactattagagggagaaggaagacagagagatatgggttgaaaaactacctattgagtacgatgctcactatctggctgcaatatacccatgtattaaacctgcccatgtaccccctgtatctaaaataaaagctggggaaaaagagaaatttgatgaggagattttggaagcaagagaaccatagaaaggctgatataattcatatgcatatgcaaactacacatgcatatggagacaccagagaacctggcaaaatcaaatcctgagaagccttgtaaacgtcttatacttttgaagatgctcctcaactccccaacgcagcttgggtggcagaaagcgaagctttagcagttggaggagtttgagtatagcctctgcacaaaacagtggctgaccactgaagtataaagacacagggagacttctagagaaccaagcacttaaaaagacaaaaccaaaaaacgagcattgacttcagtggttgcataccacaaggaagactgagcttttcagtttgtatttatgcatgtctatcactgactaaatcataaaaacacagctctcaaagagggaaaaaacagaatccagagtcacttcaatgccttatctaaagtgtccaattttattttatttattatttgagacagggtctcactctgtcgcccaggctggagtgcagtggcacgatctcggctcactgcaacctccgcctcccaggttcaagcaattctcatgcctcagcctccagagcagctaagattacaagcatgcaccaacatgtccagctaatttttgtatatttagtagagacggggtttcttcatgttggccaggctggtctcaaacctctggcctcaagtgatctgcccacctcagactcccaagtgctgggattacaagcgtgaaccaccatgcctagcctaatgtctacttttaaagcaaaaattactagaccaagggaaaaaaaagaatctatcaaaatttgtgcttaatagtccagatattgtatttagtaaagacttcaaagcggctattataaatattataaatatgtccaaatagttaaaagataatatactatgagtaaacaagtagggattatcaatagagaagaattatctttttaaaaatggaaattctagaacttaaaagtacaataactgaagttgaaaaggaactagataggctaaccagtgtatctgagatggcagaagaaagaatctgtgagcgtgaaaaatagaccaagaaaaaagctcaagtctgaaaaagaaagatgaaaaacttgaagaaaactatacaacacttagatatctgtggggtcaatgtcaagtgtcacaacatatgtttaagtgggagtgccaggaggagagacgaacagagggaagaaaagttgttaaagaaataattgctaaaatcttcccaaatttggtgaaaatgtattatccttcatgtatgtgtaagaagtttgacaaacccaacaaggaacacacaaaaaaactatgactagacacattataatcaaagttaaaagaaaagagaaagattttgagagtagcaagaaaaaaacaacgaattatatgtggaggatctttcagcaggaatgacggagtactgaaaacactgctatgatacaagaccggaaagacaaaaaaccaaaaatccaaaaaaacatgccgaccgataatttaatatctaacaaaacaactcatcagaaatgacggtaaactaaagacaggtccaaataaaaatttaatgtgttgctagttgctctgtgctacaacatatactgaagaaaattcttcacactgaagggaagtaattctaatcatattctgtatccacaagaaatggtaaatatgtgtgtaaatacaaaatattgatctatatatacacacaatattgatctatatatatactatgctgtttatatatacaacaatttttgcttctcttaatttctctaaaagatatatgaatatttaaaggaaaaattaaaatacactattattttgtttctaatgtttataggtgtgatatatgaaaacaatagtataaacatgggttgagtgtgctatttcagtacagatttcttatgtgttctggaaatacttcagtgttaacttgaaacatgttggcataagtcaaagatacatactgcataccataaaatgaccactaaaataacaacatgaagcaatataggtaaaaatctaacaggtgaattaaaatggcacactaaaaaattctgtttaacataaaaagtattaaaaggagaaacagaggtaaaccaactgacaaaaatagaaaacaaatagcaaaatggcagacctaatttaaaacatatcaataattatattaaatgtcaactatttaaaaactccaatcaaatgagacactcattcattgctaggaaaaatgcaaaacagtacagaaattttgtaaacctttggtgtttaaatgttaagcatatcggccagccgcggttgcctacgcctataatctcagcacttcgggaggccgaggtgggtggatcacctgaagacaagacttcgagaccagcttggccaacatgatgaaagcctgtctctactaaaaatatacaaaattagtcgagtgtggtggtaggggcctgtaattccagctacttgggaggctgagtcaggagaatttcttgaacctgggaggcggaggttgcagtgagccaagatcgcaccactgcactccagcctcagcaacaagggcaaaactctgtctcaaaaagaaaaaaaaaaaaaaagaaaagaaaaaaacatgttaagcatatcacgtaattcagcaattttactttcaggtatcttacacaatagaacggaacatttatgttcacacaaagatttgtctgtaatggtcatagaagcattatttctaataatagctcaaaactggaagcattgcaaagattcaccaacaggtgaatgaatacacaaaatgtggtatagccatacaatggaatagaattcgtaaaaagatacaaactactgatataagcaacaccatagatggaactcaaagcattttgctaaataaaagaaactggacagaaaaggctattgtgtaattccatttagataaaatttaaatgtggcaataacaatggtgacagaaatcagtgatttgtcaggactagtgttggtggcagagactgactgcaaaaaaggcatgagggaaatgttgggcatggaaatagatattctaaaactagattttggtactgttttcatatggtggatttaataatactgaaagagttatacacttaaagggggtgaatttcattttatataaattatatctcaataaagtctcaaagaaagcagattgaattacaaagttattaagattcctgatgtgtatgtgtctgtgtgtgtgtgtgtgaagcaatgctttgttccacttctgaattactgcacttttgcttatactaatgaaatgctgccttagtaattattttcttacctggttcctaagtagcttaaaatcatgcaatgcgttagaggagaatagatggctaccacttagcattcatgactgatcatgagcacaatgcctgctcacctcatgggccacatggtgtgagagtgcagcactgtggcctgtatttaaacatttctgatatacaaagattaaatttctgatatagaaagattgaaatatgaggaaggaagtcaccattatagttcatatttcttcatggagaaacatgaatggaacttagccaggggccttatcattactattattcttaattgcagtggtggttgtgaaggcatttgttgatgttgatggcgacactggtagtgacttgggtaatggcagtagtagtggtagcaagcctgggaaccatgggatcatttgtgtaaaaggacaaacaaaccaagatagaaatattttgcaggtatattctctattccctttagatgtagtaaggcaggagtgatcttggcactctcgctggcttttctcacaacacaaatggaaaaggttagttcatttggcacctcagtacagctctcctttccatctcctctactgcacagaagcctattctaatgtacgcagcttctttagtaaaccagctcattgtgtgttgacattttacttttgtgtacagcaagaagatcatgaaaaggaaacaccattctggccatgcccctgcttaatccttaaaattctcactggaaaataccgcatcaacatgcttcatcgtgggcttgtggcattttgttgtgttttattttgttttgtagctagaacaatgctttttttggtttgggcaccgtattgcctggggaagaaagggaaatgtctgttattgcttgctaaacatctaccatgtaaccagccaaaccgcaggagctaatctcaaaccagggagttgacttctcaaggaaggagtcctgtggtttacattcctttgactataacctcttgagtcgccacgtttttccacctaatttttctatatgtacttcaatatgtagattttgtgctattgcaatctgtgtggtgttttatttgaatttttttaagagcagaaataaccaacagtttatattcttctgtctgtagtgtcaagattagaatcaggtcacacaatttcaaggtctatttaataagttgttttgcctctttctcaatgtaatttttactaaactcatctgaaaagtagcattcattcctatattcattcttccattacaacttttaaaataccttctatggaccctttttaatgcactaggaaaataaagggaagatatataaggtctgatttttacccctaaagaccttatagtctggtacagattctgttcattagtgtacctgaagcaaatagaatgtttaaatgaggtaactgaaaagagattaaggaagatactatttataatgtattcatgaaaaccaaaaagggataataagcacctcatatctggtaagatcaaagagccactaccactagtaaatgtgaaggagcataggtcgtaaatacatcacaaataaagagacttgtggctctagaaagaaaatgctgcaaaaggaaccatgtcctaaggttggaaatacagccattgcaaacatttgaccagcagatgggaagatggggaactaactatctcacttgtactctcctcccccattttttcagtgcctccaattggtcaatctagctggaagcaaggggcatgggagcttgaatgatgtaatccataaaagtgagcttcctaacacacagggaaagaacaagaaaaatgtggagtaaatctaaagaaaacaaagagaaaacagaatacagacaaatttggcaatgacatctcatcaataaatttgctttggaaaaggattaaaatagttagttccatttaatctaattaattgatccatttagctatggtttctttattagtagaaaacagataccaagtaatagctacaaatttgtaaaaccagagatagaaggaggcttatgagtgaaccctattactttaatcatttccatacagcatgacacattgcacagctgttcctttatttcaagctcgatctatagttcatcttaattttatgagacaaatactaaacatacaggaaaagagcatggaaagagaaaggaggggaaaagtagaacggaagtcaaaatgagatagtgtgagagtgaagagagagaagagagaaagagatagagggaaagatggaaatgtaaatgaaaggcaatggaagagaaatacattgtgctgttgtgaataattttgaataaccctaatcatatcaaaaaaaggtcattttatattgagaaatctcaagttctggcaagcagcagatccttgcagctccatgactcctctgattttttttatatgttaaattaatctgagttttctttcacgcttttttctcttcttgctatatacagtgtcatcaaaaaacgtgcttcaaatatcacctcagtgcttataaatcccatttctgtatgttagttttaacttttattttctctcaagattaaggtccatataaccaaggaattatcacatatttccactgggatgtcaaattcagtttgtgtaaaatcagacctgactttagtaccaaaccttttatccagcatagaaactcagcaatatcagtgaatatcctttcatcctcacctccaaatacaatcagacgttaattccttcaggttcttctgggttcagatttctcttgccttctagcatttgaaaatactctttccacttcttcatcctttctatcttccctacctctttttcaacttgtattcttatcaaggtaaccccaactcgaaactctagggttcaacctaaatcttctatactttttcaaatctgattcagatgcccctctgatgtaatcttaacctagcatcttaacatcctctttttataacattttcataaatattttctagtcttgtgtagattaaatctataggagagacagggctatatttattttgttcactctagcatccttagtccctagcattaagtctgtgtgacagcagatcttcaataagtattacttgatgaatggatgatatttttaatgatttagttattgtatccaaacttagaatccagtttctgatatacaaatggttttcctaatttaagtatctctacaaaataagttctttctaagttcttctttcgatagaaatcagactttactgaattctgaattaatgtttggcacattagattgaatggaatcagaaacatgttgctcttcccattgtaagacacagagataaatattcatatgatatagttctgcttatcaaagttaggtcttcccagatactaaagtgattcatagctaaatcattcaaaggcaagataatattggtctttatttttggaaccagcatctcatcttaaaatttgatggtggggctgctaatagaatggtattctgattatagactcttcaatttggaaagcactccagctgacctattttacttgtactctgggttattcagaagtgcaaagaaaattaaaaatccctcttgacttctggaagagcaaaacttatcttctgaattaatgcattttagaattggactgcagctcagcagtattgggcacttggactaataagcttactctgtacaatcacttgaagaataaagtacagctgaaccacgcactgtattaacaagctagaacttgggttaaatttgactgttgattcattctttggcatcatcacctttatgagtctttgcctctctttaaccttagctgaagccacaaacattgtctgatcttgctgacacctgggatgcactcagaatgatgaatgtggaagctttgtggaggcaataaagttgcaacacccataatctaaaactggctcaaggaatcaccatgaatcaaccaaagatctgatgagcgtaaggacagctagcagcctaaacatttgacatctattgcctttcctaaagaattgaaagctgcctgctcaaatgagagaagagggtagaaaggacacttaagccttgaatataaaaggcatttttaaagtttttggttttttggtggtagtggttggaaaaaggcaaaatatacttcagcccctctgatatttacattattttcaatgtcttcttaaggagatatttaatatatgtattagtcaatatagattgggtaactattggaagaaagtgcagtaggaaaagtttacaaaaaatattaaatatgccctcagtctcctgatttcagtctttggtcattatctgtccacagctggtcaaaatttagggttgaaacaacacttgagaatgataagctaaagctatggtaccaactgcctacctagtcaagggatgtgtcagaatcatccagagactcttcatagtcctcattcctgaatcctctgcccccaaagcattgattcagtatatctggagtggggttcagaaaactcagtttagaactccttctagaaacctaatttaagaatatgtctattttttatattctaaattccataagcctttgtttaaaatcagaaaattaaaaaataaactaatttaaaaataaactaattctatgttgctttagattgtataaaattgtcttgttgtattatttttactaatatatatgtttgtatgtatatatctgcccatcttgtttttctgtagtatgtagttattcctatgttcttcattggtttagtgctacaaagcagtgtctctcttctggagggctataggatatgcaactagtacatgctatttaatgcttccgttttgttttatctgacaaggtaataaaatttaagctcaggagcaatcatttctttatttgggggatggccatgttttccattacttttcagtaattggcctaatgttaggattccattgtacatctgttttaaattgcacaccgttcacaccttttttgaatgtaaatgtgacattaattataaatgcatgaaatatgggtaatggtgaatcagccagtataagagaaagttgggacagggagccaattcagtcattgcaatgccagactaaatcgatttgctatttggatagtatctcaaaactagtaaataatagaaaaatttttatagcttaactttcaccaaattctctgccttcccggatgcctttaataagtaaacgacacagatttgagggtctatcctatgtaaccctaagggtctccagggtctttcaaaaaattgttgagggtccctaaaaattgcttatatgttgtagtcccagctactggggaggctgaggcaggagaacggcgtgaacccgggaggcggagcttgcagtgagccgagatggcgccactgcactccagcctgggcgacagagcaagactccatctcaaaaaaaaaaaattgcttatatgtaaattgttccagtgaaagctctactttccattgttaaacgaaataattaacatcacaataagaagcatcatgttttcatcactgcagtgatttagtgagtagatacttgagtatgtacacatttgagtgattaaaaagcctctcacactccaacctgggcaacagagtgagatgccctaccaaaaaaaaaaaaaaaaaaaaaatagcctctccaaaggtctctccatactgaaggacaagcttcactcaaattccagtatcgatcctttaagccactgctagaaaaatgtaaaataaataaataaataaggccgggcgcggtggctcacgcctgtaatcccagcactttgggaggccaaggagagtggatcacgaggtcaggagatcgagaccatcttggctaacacggtgaaaccccatctctactaaaaatacaaaaaattagccgggcatggtggcgggtgcctgtagtcccagctactcaggaggctgaggaagaacggcgtgaacccaggaggtggagcttgcagtgagctgagatctcgccacgcactccagcctgggcgacagactgagactccgcctcaaaaaaaaaaaaaagtaaaattaaaagaaaacaaatagcattgtttctttctttctttctttctttctttctttctttctttctttctttttttttttttttcattaaggtttaaaaaataccagggtcaagtcttaaaaaactccatcacagccttaaaagtaaattctgcagactcttcaccttatcccaagccatggccatcgctctaactcagacttgtctaggcgtgcacattggcaaagaaagctctgctcatgggcaccctttggcaaagacttttatttaacggaagtttttaacccacaactgaggtcttatgaacgggaatgccaatctttaactccaaatattatttattaactggttacactactacatatggaactttgagtgcttttatagagagtctgggaggtaatttgaaagagctctttttataaagtctttgagtaatgcaagaaactcaattcagtgctatcatgaaacctgtgtgtggagtaatgtgggagtgagagtggagtcttcttacttgaggaccaggcgatttgctggttgcgcactggaatactcagagattacagttgaatttgagtgtgtgtataccgccagctcatcagcagtaccttgagctgcatggtggtctcaagcaatgattacattgttgcattggagaggctgatctagcagaagcatcagcactagtggtagatagtttcccagaggtggcttttgaaccttgaatcaacttcagaaaaaagcgcagaagggtccatggttatggggccatgttgatgggttgggccgtgatgaggcttagcaagtcccagatgcctgggctgtacacacctcaaagggactgggtcggtggaggacctcccagggtgatctaacttgaaatatataagatcattcatcctccaaagtcaatgagatcacccctacggattcctggaaagaattaaagagaatttgctggagatttgaatagggctttgcagggaaccacaggtcgcatagtatgtaggagggcatacatgatttctatgtaaatgcaacccaatctgtatctctaagctggtgtggtctgaagaaacaaaggttacataatctgtactggctctggcaaagtcgtagccattgtttttttagatagtctcatagaaaagactgctggaactggttaatgggtaaatgcagttaaacctagttgaaaagttatttcttaagagtactgattaagaacttaataatattctgtaaggaattttctaataatctctcctggggctctgctcctggttctgccttttcaacagctgtgttattaatttggacaaactaaatatatgtattgtatgtgtatgtgtacatatatatatatgcacatacatatacatgcacacacatgcatgcttaagcatatatacacatacatgtatacagacatatatacatacacaaatagatgtttatatgtttgccataattacttaatttgctgatgagagaaatctggaagggacatttaacaccataactgaccccaagatatttaacgaagtccactaacttagaatgatgaaccaaaacctaaaaaagaaagttacatggaaagaaatgcaaagtagatttttaatcaattacacaattataatataatagaaagtgcactgtgggaagaagctggtttccagcccttgccttgtcattaagtccaattagacaagttaggccttgagataggatgtaaatccctttatctataatgtgactagggtttgagcagatcatttctgaaatcccttaagactaaattatgagtgtgagggttgtctggctgtgtttattgttagaaaaggcacatggcttggattcaatagatggaaatacaaggtctattgtttaatagttgtatatatttgagcaagctatttaaagtctctgagcctcagttttctcatctgttggataaaaattataactacttactagaggagtttgaggaagcataaagggagataatacatatgaagtatgaggagagagtgcagcacatagttgaaattaatatatataatgtattctcttaattcagccttgttttaaaattttttaaaggtttagaagaaatttccatcattcagaaatctaagtgaacaaataatgtaatatttactgccaaaaattcaagcatgcattattgttcacagttcataagagttatttgctaagagtgatgtctccaaatagggtgctcctattttaagataagccataacaaattagggcttattaaaaagaacatcatatggagagaaaagagagttttgggaagctatttcatataaatagtcattgaaaaaatgcaatgtatcatgagagacatgcaggttgtaaagggacattgaaagttctataaaaattatttttgacatttggtcatcaatgacatcaagtcaggtatagtctggttatatgctgcctctgagaaccaggtagaaccaagtaatagaactgacatagaggctgatatcaattcattatgaaatgaacattgcatcaactagacagatctgacattgaaaagatgacctcatgactcagggacatccccatcactatgggcctcaaaaagttgtagatgacctttaattaacatggtagaaagaatcttgcattggcttagaggatgaaccacatgatatttagatttccttgtaactttgagactctataattccaagaaggaagtgggttgacaaggcttacattctgcaaaccagtttcatcagaactgctgtgttgtgacctgaaatatgaaggcgtttttgacaaacaataagacagccttcttcccagcacaagaatttcccctgaggaattctctgatgttggcacctcttgaaatagtgctttggcaacatacgtgagcctgcggcaaatatatctagactccatctggtttgcttcctcttcatcaccctaacacttttcctatagccaacacacactacttggctttattaattagttagagttactgtgtatttatccaaattttcaactccttgatcttccttctctcatctattattttactctgctaaagtgctcgcctaatgtgggttcagtcatttaaatttttggctctggcttcaaccacagatgttgggttatgttttattgtcacgtctttaacaatgacagaggaatgtagagggggctgagaaacttggacagtaaaatacacaccctaaggtctttgtttctattatcaaagctgaagacttaagcctttgggaaaattgaaagtttatactctgggcagtgctatattcttttgctcagagaccggcctctatttcccatccgtgcacaccttggggcttcctacaatatgaagtatttgaacgttgccttatttttagaaatcttagtatagtgagcagtcttctgagatggctccaaataatccccacctcctaatattcacactctttctattcctttcctttttagtgtgggagggacctggtaacttgcatctaatgaggagaatatggcaaaaaggataggagaacatggcaaaaaggacaggatgttacaaaagcatataggcgctttctttctctctctctctctcattggctttgatgaaacaagcttccaggtttgagacatccacatggcatagaactgaggatactgtcaaaaaagccaaaggcctttagtccaacaacccacaaagaactgaatcaacaaactgtgacctcagaagtggattatttttgagtttatccttgagatgagaccatagctccagttgacaactggattacaacccatgacagaccctgaagcacagaacccatttactttgtgcctggattcctgacatataagagccatgagataataagtgtgtgttgttttaagtgactaagttttcaactgatgagctatacagaaatagataactaatatactcgctatagtagacaaaaacccaaggctggaatataaataatttaggtaccaattattcacattactacagaataaactctaggattccttttaatctaagtgcctttaagaaattaagtcttgtgtatcttttgactattaaaagtagaaaaatatagagttaaaagaaaacactcattgttaattaaaaattaacaagaagttacaataaggcatcttatgacctttgggtgttatcgatcagggattcactagagaaatcgaacaagtaggaagtatataacaagggacttattgcaaagaattggcgtacacaattatagacaagctagataaatctgaaatccacagagcaggccaacaaagaaggacaggctggaactgtcaggtgaaaacggaagcttcagtccactgggaaaatttcttattctcctgggaaatctcagctctgcagttaagaccattcaactgatttaatcaagtctacctatattaatctaaaacaatctcccttactttaagacagctgattatggactttaattatatctgcaaaatacctttacagtaacagctaaattaggatttggttgaataactggagactattataatactgaatatcatatcatgtaaatcgaagtggacatatacaactggccatcaatcatttaaatcaaaggaaaataaatgtgaaatttatttgaaatttgaaatgctcatagcattctagtaaccatttgcaatgaaaattaaagccaatattttgttttcatcttcatggagaaacttacacagttgaaaagtaaatatgagccagttctacaactaagtttaaaaatgtatttctttctcagatctttattttattcagaactttgagagccacatttgaattaactccaatgatataaaactattcaaatattcaacacaatagttattttcccaatttttatttacatagtaaaatactaagtaaatgttataatcatgtttttaatgtaattattttatggataaagaaagaaaactgtggttgaaactttgtccaattatcaaaaacactaatcaatttttctttgacttgtttactggatcctaaaacttgttttttaatatctagcaattgagccatctcaggggtaaatggtaggataaagattctcttctacatgtctagtcactaaagacactattaccataaataagtgatttgggcaaaaaaagcataaattgtgggttatttacctattgtaaccaaaaattaagatcattttatatattctatatgcacttatctatctatcaaatatttactaaatgccaggcaggggtctagttcctggagatagagcgatccctatctttattttaatctaaaaacaaatgagatttgaatgaaaaaaataaaaataatgatagagatgatcagtagatggcatcaagtgaagtaaatctgatttgtttggatccctgttcttttaaggaaacatcttaaaagatagcatgagaacaaattatatcaggcatttacactccctgagagtaaaagctacaaaaaaaaacagctggaaatctcagaagggacatttggaacatcagcaatgaaagatatacagcaaaaatttataaatatctgggtaaacataatagactattcttcttttgagttatttgaaactgttagatgcttgaattgcaacatctgcctgcaagttctggaatctcttaaggtcagttacttctgcattgtgtggtggactttatgttcctgcagaaatagccttgagaagtctgggattctcactggcaactatgttgcaccaagtactagaagcagctgagaaacatatccagatacatggttttgggggcattttgagatacttttgttattaaagagaccttggctcatctcagaatttataaagaacttatcagacagattagaattccactgagttccacagtgtgatgtgtggcttccacattgtgtaggaggcgggtgtattatactcacatttttctcccttttcctcctcctttattttccaactcaaatacttgataaaacaactagtttatgtgacacaatgtgacctactaattttgggctacctgcagattcttcaaaatgtttgaagccaagccatgttgtttactttaaataagatattgatgtaaaaatataaatcaataaaataaaatatattctcggtagcaaagaaaatctgaaataaaatagaaaaaaaatctattttcttataatcaaatttgaagcattaaagaaatatatgtccatttctcaatgaccttcaagcacgcattcatttttctaacatattccctccatctcctccttaaaaatataggagcctaaaccaagaacattacaaagaagtttacatatcagacaagacgttggacatggtcacctttccacatccttggtgcttttcatcctgagaataggaaacaaacccatttccaatgttctcaaccattttctgtggtttctttgctggctatcagctgcatttgtaccacaaccacctgaaaatcaaccaatcaatctctctctttatttctctctctctctctttctctcatcctcaagataactacagtctttacatggtctttacacttagtgtttgactaaatatgtcaagctaaaggtataaaaactgactcaacccagctaggctgagaccacatttccacccaagtatttggtggctggcagcttttgaacaggactcctgaacttgtccttgaaaaccagtgtaatatgaattactgtattgatggcaatgtgcacacaaactttctgcctttttgttccactctcccctaccccattaatctcaatagaaacatttgtcttttatcctaatgttgtgttatatatggtgtgtgatatattcttattttgtgttattacaagatctttaaaaagataaaaaacagaagcctccaaatttgttctttaaaatatactaataaaagaaaaacttcagctgaattaaatttaaagaagtttaattaagcaatgaatgattcgcaaatcaggcagccttcccagccagggtaggctcagggactccagcagagccacgtggcggaagaggacttatggactaacaaagaaagtgagctacacgatatggaagtgaggtacagaaacagccagattggttacagctcggcatttgccttataggctgcggtctttttacacctccacttgttatgttaacgatgtacaggaaaacctttagggccaaccttaaagtatgtaaggaggcagctttaggctaaacttgatttaacaataccaatactctctcgtcatatctcctcattttatatccactttcaattagacaaggagtcagctattacacgtagaaccaaacaatttaggggcacacatacctactcacatacatacacacacacacacacacacacacacacacgctactatgaagagcttttctgtacttatgtttatatttttattaatttttttgagacagagtctcactctgttgctcaggctggagtacagtggcgtaatctcggctcaccacaacctccgcctcctgggttcaaacgattctcctgcctcaccctctcaagtggctgggactacaggcacatgccaccttgcccagcaaatttttgtagttttactagaaaagaggtttctccatgttgaccaggctggtcttgaactcctgaccttaagcaatctgcccacctcggcctcccaaagtgctgaggttacagatgtgagccactgcacctggctgaatgaaggggttttagaggtaaaagtagcaaaaacaaatttggggtatgtgatgtgatcaatacaaattattgtcactttcctactttattctcacctacacatataaggagtttcatccctcacttcgaggggaatttctccatttaaatgtttgatctatcctctcttgtaatgctgggaaccttctgagatgcaacggtgcaatctcagctcactgcaacctccgccactcaggttcaaacaattctcctgtctcagcctcccgagtagctgggattacaggtgcacaccaccatgcccagctaattttttgtatttttagtagagacggggtttcaccatgctggccaggctggtctcgaactcctgacctcgtgatccgcccgcctcagcctcccaaagtgctgggattacaggcatgagccaccattcccagccattattttttatattgataaatattttaagcatacagaaaaatgtagtggatgacataacatatgctcgtgtactgcccacagcttgctcacatcctcatctgtattcatttttttcagtctttacaaaaagacagaatattgcagagacagttaaacaccctcatacttccctctttttaatgagtgtctatttcagttcttgccttcagaaaattgaactaccaggaaggaatactacttatcttctttttgaaagttccccaggagatgaaaagttaacctggcacagactgattactctgcatagtataataaaaacaaagcttttctatttggtgttagaactcatataatggttttcagttttttatatatacatatataaaatatatataatatatattatatactatatattgtacataatatatattatatactatatattgtacataatacataatatactatatattgtatatattgtgtatatattatatataatatataatgtgtatattatatattatatacaatccatattatagataacatatattatatacaatatatattatatataacatatattgtatacaatatatgttatatatattatatatatatatttgatagttgatacatcttcctgagtatgtattcttcaggctcaggaatagcactccataacagcttaggagatccaaatgcgctaccccttctctgtcctgctcctggggtggaccaggtagcccctggagttccaaggctggtggtaaagtcacccagtttgtggctctttgttagtggtcctgggaagttaatataccaatcctaaaaatctgtattttctctctatgcctaaaatttcccccactatagaggctgtcatatgggctccagattcgatggctttaaggaattaactttttttaaatgatctaaaaatctaagcttcctcaagtccaggatgtctgtctgttttgttcattgctttacccctatttcttggtacaaaatgcaaatggagttagcaataggtgaatgaagtagatgtccttaggcacatatgataaaaaattgattcctatgagctgttgtttttcagcatgacagtagctaagaggtgaacaatcagggtgagtaaactttggagaggagaaaagggcaggagtcatttcttagagtcacaatttcttagacttggaagaactttgtaactaataaatgaatatttttaaatgcatccctaagagctggtcatcacctttctacttcaatagctctgaactggaaattgagtctcagtcctactgctagcttccatatctttagataagtctagactgccatttcttcacctgttaattagaaacgtggactcaatgatttttttgtagctcatgatcttgctggccacaaagacctctagaataaagtagcactcatgaaaaaggaataccaaatggaatttaactcactttgaagtgttgtctagaggttgaccatataggcctacttcagacttagtttgcatttcaagaacacgttattttgaatgataaagtcagattgtttttcaataaacaaaaacaattttgtattaaacatcaactgcggctaatccacacagcagataaaacacatacaggtcagtaagagagtcaagccattgacaaagaaaaacaaaaatataaggacccactttcttctcttgtccaaggtgaaaatgaagattaaaatggaacgaaaaaatcctggaagcagccatcaccatctagaatacactcagggttttgagtttatttggcatttgctactgttttccatacaatcaccacccaagaggggggtgtctctaaataaaggaaatgctgggtgatgaaaaataatggaaattctaataaaatccggaagttaaattctcccagtcgtgttcctccagctaatccctcatagtcatccttttgtttctagaaatggcattaaagccacccagtgggggaggggggaaaactctacagaccgcttttcactgtgggccctaaaacctcatccccaaatgtaggttttgagactctgcccagcacagctttgaaagttttgccatgaagtcctaattgctaagtaggtgcgtgctcactattactccataaagggaagaaagaagaaaaacaagtgaaagaagagaaagtaaaagacagcatatatcattttgtcagagaaatgacatattctaggtgcttcgctaggctgaagatgattactcctgtatataaactgatcatttctttcttaagaagtatgtaaccctcttggtgtctctaggacattctgttaaaacgttatccccttcccaccttatagcctaccatcacctatgtaaataagatgctgtattagtctgttctcatgctgctgataaagacatacctgagactgaaaaagaaaaagaggtttaattgactcatacttccacatggctagggaggcctcacaatcatgatggaaggtgaaaggcacatctcacatgacggcagacaagacaaaatgagaaccaagcaaaagggggtttcctttataaaaccatcagatcttgtgagatttattcactaccatgagaacagtataaggggaaaccttccccatgattcaattatctcccaccagattcctcccacaacacatgggaattatgggagctacaattcaaaaggagatttgagtgggaacgcagccaaactatatcagatgcttttttactgctcaatggtatttgccaaaggcacagttttcaaaatcaccttgacatttcacttgacatggctgcttcacctctgcttacaaataagttttgtttctaatcagaactactgattacagatcgagattgtgttaaacttatggtgatcacaaacaaataaaatgttggggcccttccctgaagagttaacggtatctcttggaaagaaaaactaacagatatgttgggaccaaaatatacacagaattgaaaaaaaacacacacacataaaagaagttttatattcgtaatggatctagtatactaagtagcataataaataactcactttaaacctgaattttttctaggtaatatgccttaaataccatgtattactttcacttataccaaggtttcaaaatctcatcactgccaacatttgtaccagataatactttgttgtgggaactgctccgtgcgttgcagaatgtttaacagcataaatggactctatctggtagatgccagttgcactgttgctgcatttataacaaccaaaattgcctccagacattgccaaatgtcccctgagaggggggacagtctcatctccagtagagaatcattgattatagagtgattataaagagtgtgattttttttttcctgtagaggataggggaatctaaccaatgaggttattcctaagtgtctcatctctagatgaaaatgaaattatatgccatcaactcaaacaggagctgggagggaagtaggataggaggtagaagtatccacattctaccactttctaactgtgtttttcgggggcaagttatttaatccctctaagctactgttcctatgaaacagctgtgaaataaaaataataatagaaatcagctccaaaggttgctgtatgtaaagcacttagcaaatgcttaatactctgcaagcactttgcaaatgataatcattactattgtgacctttcttgagccaaatagccaccgtcacctgcatcctatacttaggagtctgcagaactattttagcatgctttactcaacatgggtttgtctctatgggaataaacattttaatttctccatttactttgtttcaaagaataacttccagactagttacaaatgtttgcttatatggtaagattaaaagcgtaagaatggcggggaatggtggctcatgcctgtaaccccagcactttgagaggatgaggtgggtggatcccttgagccaaggagtttgagaccagccttggcaacatggcaaaaccaagtttctacaaaaaatacaacaaaattagctaggtgtgatggtgcacgcctatagtctcagctactcgggaggctgaggctgaaagatcgcctgagcccaggaggtcaaggctgtggtgggttgagattgcactgctgcactgctgcactccagcctgggtgacagagtgggaccctgcctcaaaagataaataaattaatcaaaagtataagaactatcatgtgtaattttcctagaggaaaatgcaatttttaaatcccactggaggatccaggacatcctcgtcacttttggcaaagaaataactgtccccgctgtaagtaggtctatttccattcactcagctacatcaggtcctctgttggaaacaaagaacctacaagagagggggaagagagtgctttacataaggactggtggaaaagtagagacaggatctctgagggagcagagggggaggtggtgttgggccacatacaacctattccctgtaggggtacaggtggggacaatgaagcagttgggtagtttctggtggtggtggcaatgccactgctgctgggatcgttctcctggaggtagaaactttgtctctgaaactctgtctttgagagaggtatagcctttaaagagggccttcataaggcaagcagtgatgttatcagcacctatggatgttcacagttccagttcctgtaggcacccccgaggtctcctcatattgtagcagtcctgagataggggacagggcagggaaggcagcagtttccctgggtggccccaagggttgggagcccccaggtcaagtggctggtagattgtaatgacttgcttggaatcatcttgcctacaccatctggtaggcccattgtaccagcaagaaagtgaaagttgtgataactactgagttggcaaatacagcttgacttaggcgagagtccttctgttcttattcagaaactccataaaagacagattaggtcggatagcaaaccggacagctaaaaatatatagaggtagacaagcagttctatagatcctgggcggggagtgaggagaaagtcccctgatcatttgtgactcaacccttggaccttcctgaaatgtaggaaacagcagttcatgtaaattctataaatagttgtataagcaaagtttttcttctgatgcagaaaaaaattaaaacattctctggagaaaacatgatcttttctccatgttttagttgtcagttttgacaagaacgatacaagctaattaaatttctgttaatttattttgtctgattcagtgactgcctgtcacacaaatccctcaataagtaagatttctctctgctataaactttctcctctttctctgaaatgccattagataaacgcacgaaaagtggacctattttactcaaataaacactaaaagcacttaaactcaatccgccctcaatacttcaactcctcatgtctgctttggagggaacctaactctttccagcttataaatctccaattgagaccattaccctttatgaaagaaatgtctttatgtagataaaatgcaaagatgaagttgagaattgatggcagatgaaacagaggaatatgtcgcattcctatttgccttgacattcacaaggagtattttctcatattattcctctttgaaataaaatttgagattgacactgcgtcatctcttcaatcttagttatctagagtgactgaagtctttatctacttgtcaagagtgataagatgaagttgcattatcatacatgaacagagcttgatgtttgaatagatatcaacatacttgacaatagtggttgtctatttaaattttcttttctgcaccattttcattgaaggctcaatccttcctcattttttgagacttagcccaaacgtcacctctactacaaattctgctctgtcttcaccctactcctattgtcatgatcaccctagacgaacattttctgtgttaggtcatttgtgcatctctataaggaagtacctgaggctgggtaatttatagagaaaagagatttaattgactcatgattctgcaggctgtaccagtatggttccagcctctccttctggtgaaggtctcaggaaccttacgatcatggcggaaggtgaagggggagcaggcacattacatggtgacagcaggggcaagagagaagagggaaaggtgccatacatttaaacacccagatttcacaagaattcattgacaattgtgaggacagcaccaggtcattcatgagagctctgcacccatgagcaaaacacctcccaccaggccccacctccaacactggggctttcatttcaacatgagatttggaaaggacaaacatccaaactgtatcaacattgtacttagcttttatcagtctgcatggtattttttgtttgtctgcatgtctgttaggttactataacctcttggaagtatgtcctgaaatccctcactgagaggataaggagaacaaaagaaggggcaggaagtagagcaaagagaggagacacgtaggaagaaagatggaagggagagaagggatctttttcctaatgtagctgctggtctatcctttagacaagagaaaatctcacattgatgtgttcttggcttcctggggctcatacatcattttgttcatgttcattatcactaagcacaacactcatattttagctgtatgtattcacaagaccttactcagagtggacaatattcagaatcaacctttagaatctcaacagagttttatattgggtttggtttcttttgctgttcttttgtatattcaaagcaaaaattattgattatacatatgttgatatgctaatattgataatgatatctaatacaccgaacacttgtttgttccaagcactttgcctgtacaaactgacttaatcgtcagaacaaccttgtggataggtactattgtcatccccattttaggggtgagaaaactgaagaagaaagatctaaaataaattacctgtggtcataaaattagtaagtggcaaagcccagatttaaaccagaggagaaagagcccatgctctgaacagcctagtgaccaattgcatgactattagaagtgccttcaatagagtcagtcaacaagcattttatttgctgacatttgataaatcagttttgtgttgaatgtatggacatggctcaaagtaaaatttcaacaattgatcctctaagcactctcctttctgtgctctcacaatagaaatattcttttgtcaaccttatagtttttggtggacatctgtgccttttttttaagactctaagcctcatgggaatttattcatgatcacatacttcacaactgtttttgctgaataaaataaaatggcttaagatagagttaaatgctcctttctccctactgctcatcagaaatacaactattaactcctatatgcatttgtctgattctatcccatattcagggatttaatataaactttaagttttatcattactacagacctctttttgaatttcatatagggttgaaaactttgtgatgagttttcttggtttttggaaatgcctttaaaaaaactggattgagaattttaatcgagggaggcaagcaggggccatgatgcccagactaccaattgaattccttagaaacagttaagaatttcctttgtttggcattagtcattttgaaggaacttcacattcaaagaaccttttaataccagcacaggagtcttgttatgttgtcttgcataatgtggtcacttctgcataaaagcatctgtattttttaattctccttggcagccgaagattcaggtacgtgactttacactcatagacactctggctcattaactgttccctcccccttgccccccacttctttcctctcttctctgtaactggaattcactcacagaacatgctgcactcttcctcaactcaaactgagtatccaggggcaagaaattgaagagcagtccgttactaaagagatagtgccacagatttgctgagtcacctcgtgatatgaattgattttctagtgctccagtaagctcaatctcaagtgcataccaagtgaaatgcatgactattaggtgatgttccctttaagtttctcttattttatatcactttaagtctagagtggttattggatattttctggttcaagattggtattcctaagagttttgcagtggataaaaagcggctatgtgcataaccattgaatgagcatacctacctctctaaaagtagatttgggttactgcatagctgccatgtgaccaaaaacagcaccagggaagagaacaagttggcacatggaagagggtagcaaacatatagtagattgccagccctgcattactacttgatacatgagaagatggaggtgacatccacacctcgccagaaaggcagtcagtcatctgctcccctcttccaaagagggtcaggcccattactttatgacatacacttccagaggaacatgaatgttaatagctttccctataacgaagctcctttccagcagcagaaagtacgcagagggaggtgagctctgaaatacaaggaggcttcatgtagagtttagaactaaagtctgtctgatttaagtcactaggttatccaaattcagggaaaatgactattacattacacttataatcttcatttcctctctgaccttgaatataccttcgcgttttctaaacctgcccagggagaagttaatgtccattccagaccagaaagaccagggcttttacatgttttagccgaaagctagtaatgtggtagctttgcccaaccaggcagtgatttctgtagtttgatgggagaggaaaaatggccccgtctccttggagaggatgcaaggatgagttctcagtctggggacataatggatcatagcccaggttcacagtcttctaatccccccacctgaatggccttaaatgttcagtaaattaggctccaatgtgattagtcacttcataagtggcctttttggggaaaatttgccaggacaactgttgagtgatgtctcaatttatggctcaagggggacaaggcatctctggtaatgccattaagtggagaaagatgaatgtaaatgtaccattttctcctttcagtggtaactttaaaatgtttttaaatatttttggccccatcatcatggcattactgctgcccatggaggaagagatgggggttccaaaggaaaagaggaaaacacttaaatggagctcctcagatttctccacttttacagcacaaaatattttttctccttactattgcatgacgaaaaaaaagtaataatgttctgctctcaaagcttggattcttcagttcaggctgttaaagatttaatacactttctgcagtaaggaataggagtgaatgcctgtacaagttgcaaggcacaacccatgatggcattgacaaagcaacatcgtggccctcatgtctctgtttgctgcaacagagctgaggtctgtaggtgctcaaggacacaaatcagggagggctgctgagtcctcaagcaagattaaattgttaagaatacctaacgtgggcccgttttaatacctttcctttcatctgggctcttaattcctcacctaggatacaaataagaactgagccacagaatgtgaggtgggatctaaaaatagactaggcctactcattcaataataccctaaaggttatggatttctgttacagacaaaaacaaacttatttcctcacagtgtggggaaggaaggaaggaatgaaggaaagaaggaaggaaggaagggagagagggagggagggaaggaggggaaagggaaggaggggaaagggaaggagggggaaggaaagagaggggaagggaagggaagagtgaagggaaaagaaaaaatttgccaagcatgcccagactaattagaggagggcaatcgcttccttggacacactctgtctagatgtgaaatcgcagagttcctctggtcacttccatgcctgctttatggatcacaaaaatcactcccaatggaggcagttttcaccttggtagtgtaagggccttggtttgtggaggttcccaactcctcagctccaataacagtggatggagcctcttctttgggtcaggttggctcctcttcaccaagtgaaagcacatcaagtctgccactgtaccctgccaagtctgacatggtgatgatgtgcagaataatcgttatgaagggctctatgtacaagacatgcatgtaaaccattgccatgcctatttaataataataatgactatcatttatgattttattttaaaaatgcatcacgtaacacccattttaaagacacagtgaggaggatttttgttgttgtagtaagtcataaaacaatgtacgttaataaaaggtccctatgtgatggagagggtagctttgtgtttgtgaaccaggtctatacctatgagcagtaacttgaagcaggaataaaaaactatctgctgccttacctagttcaagaagatccactttatttcattgtgtgtatttgtttgcgtaggttaggagggaggggatagaagatttacaattgctacacctaacacccacatttgtcctttataaacaatcaattattaatgtttaatctaatcatctcaccattaaaaaaccttttatgattttgagcttcaaatggtcccttgttagcgcaattccatagtaacagattcaggacacgtacagtaaagatggaagaaactggcaagaaggatccgaagcttggcacaggcacaggaagctgacctggctagaggaaacaggagaccagcatttggtgctggacctgagaagacgggatgctgcaagtgtaagaaatgcatgccgtgggctgggcacggtggctcacgcctgtaatcccagcactttgggaggccccggcaggcagatcacctgaggtcaggagtttgagaccagcctggccaacatggtgaaaccccatctctactaaaaatacaaaaattagctgggcgtggtggtgggcacctgtaatcccagctacttgggaggctgaggcaggagaattgcttgaacccaggaggcagaggttgcagtgagccgagattgtgccattgcactccatcctgggtgatagagcgagactccatcccccaaaaaaaaaaaaaaagaaagaaagagaaagaaaaagaaacccatgccatgaataaacttcacacattaattaactcagattttgcctcctgttattcagatcttggtctttccagattatatagaaaatctgatatatttctcacttgctcctcgctttctgtgagatgggcagtgaggatattattatcccattattccatttacaccaaggaaactgatgcaaagtgacaggcccaaagtcacacagcttgtaagtcataacgccaggacatagacccagtgtctggacagttcaaagatgagtggttttttttgtttttgtttgttttttaaaacaagcagtccactcttagaaccttctagttgatactgcccaagacatcaaactgaaattcttcgttcagagtccatggtccttttggtgatgtatgcatgagtttctcaggggactcatgactcctcctcaaaatgtcacatgaaagtttgtggtaggagcacgtttgcctccatctgcaggataagtcttcacccttcactgaacagactggaatcccactgtattacgattctgctataaagaactgcctgagactgggtaatatataaagaaaagaggtttaattgactcacagttcagcatggctgaggaggccttgggaaacttacaatcatggcagaaggtgaagcaggcaccttcttcacaaggcagcaggaaggcgtgagtgcaaggaagggaaatgccagatgcttataaaaccattagatcccatgagactcatgcactatcatgagaacaacatggtgaaaactacccccatgatccaatcacctcctactgggtcctttcatcaacatgtggggattatggagattacaattcaagatgagattttggtggggacacagccaaatcatatcacccactgatgttttagaatatgctggaaatgtgggaagatgccgctacgctcaatccctgccatttttccacccaaaaattcctaaagaagactcatatgaccagaagaaaacagggcagcacttaggtttgttctttgtctatgtcaaaacaatctcacacatgcctcgggaactcagaatcgacactgacgctttcctttattccatgtatggaagattacatggattacatgaatagatgagaaggaaagtttggctttggtttttaacataataagaagtctgcagggagatgtttttctcacttaaatgttgaattcttggacaaaatgggtattggacttcacaagagttttagagtttgagacaggttgaggaggggcagacaggtgaactgaggcagtgggcaaagagatcattgacaggatgcagacgatgtttatctttcaaccaccaagggcacacggtggccaggtctggcacgggttggtgagttgcagttccccttttgtgcctctgccaaacctccttaatcttgaggtgtagaacatttgctgccttagcccgggcctcgccagagctcagctactgggcaggaatgcttcctttcctaggtcaggctgtccagacagggtccttcaggggcctggtctgtctgtcagactcttttccatcctcagtcaccagggtacagagtcacgaacaaaaatactccactaatgctttggttttcctgtgaccctgcagtccaggaaaaaggatgtctagcacgaaatttttctgtgttcaagatgcaatgtggtctagtgggaacgcttcagggctgaaaatttggagacttgtctccaaaatcaagctttagcactagttctgtgaccctgggcacataatatgaactagtaattaaagaggagctcaactgatctagctgcctgatcttgtgaaatcttcatatatagagaaaatagagagatgaaatcataagtgaacagaaaactaagagctagatttgtagctagctctggcacatgcactagatggtctagaatgtattttgtgtcctgacttcacccctggcttcatcttatcttccaagctttatattccatttcaatatgattttttccactttttatattgctatggctatgtatattttcaaagctgtcttaaataacttttgaaaacatgcatagcagaaaggaagaaaaaaaaacgaagacagaaaagctagatgccattcagcaataactgccatcatttcattattatctcactgaaatcccagcaaatattttccttttctaaatatttgttacctaattcatggcttctgctgtaccccaaatcctaccatcatcatgaatgacaaggacaaccccttttacattctggcttctcaaatgcttggtctttttatctccattgacccacaattcctggaatttttgcatctctgaaattgtaaattcagacagatcctttctatggactaaacctctgtatattacaggcaagaaaagatgactcaagctggtttaaactctgaagggatttattggtttatgaaatcggaaagcccataagtatgatggacttaaggttggattgattcagtgactcgatatggtcttcttggactgagtttctttccttctctgctccctgctttccacagtagcatcttctaggtgtcaaatcccatctttttctgggattctcccacgataccagggaggagagtgcaaacctttccccaaaaaccctccagaaaaggctgccttcattgtcaccaatgcaaattgggtcacacttctgttgttgttgttgttgttgttgttgttgttgtttgagacggagtcttgctctgtcgcccaggctggggtgcagtggcacgatctcggctcattgcaagctctgcctcccgggttcacaccattctcctgcctcagcctcccaagcagctgggaccacaggcgcctgccaccatgtctggctaattttttgtatttttagtagagtcagggtttcatcgtgttagccaggatggtctcgatctcctgacctcaagatccgcccgcctcagcctcccaaagtgctgggattacaggcgtgagcaaccgcacccagccaaactgggtcacatttttaccccagaactaggaatgttgcatcatgattggactactgtgcattgattagcagaggtctaagacacccatctaaagccctggatccaggaatagaattcatgctaccgaccatgtacaggctgcttaagggaggtgtagataccaaaacaaaggctgagatagttaaaaagaggaggggaaaaaatgctggacagttcacaacaatgcctacgcatcagtttctcaacacagtctcccattcttctacctccctcatgaagtaactctaatatactagttatgtgtcttcaccagtatctttagtcttaagacattcaatatgataaccaccagccacatgtgcctattaaggtttaaatcaattaaagataagtagaatttaaaattccatttctcaatctcactggacacattttgagtgctcaatagtaacctgtggatagtagcgccatattcagcgacacagattgacagcatttctatcattaaagaacattccattggacattagtgctcttccatccactcacccaagcctggaacctaggtattaccttgatatcttctcacaaaattctggccattttactgtctaaaaagctcctgaatattctcagtctctgctacaaaaagctcctgaatattctcagtctctgctactcttcatttagtgaagtttcaaatcatctgtaacccagattactaaattactctaattttctcagaatgcagccacaatgccctttttaaagtgactgtttcctaagtaaagccatttgtccactcctcttaggataaaccctaagatggaaaatgacttacaatgctcttcattatccagatgtttctcagttttgtaacctccatttgttcccactttccccatgtcctagtttgaattataggaagaagcacacagtatggaagttaagagtgtggattctggtacccatgacttgggttcaaatcccagttctctttttattgttttcttcctctgtaaaattcaggtaataatagtttctatactagaaggttcatttgaagacacattgaagtactagtataatgaatggcatacattagatgtctaataaacatttttcagattaataaatgaactataatcaggcacagtggctcactgtaatcctagtatgttgggaggctgaggtgggcagacggcttgagcccaggagtttcgaaccaacctaggcaacatgtcaaaaccccatctctacaaaaaaatacaaaaaaaaccccaaaaaaacaaaaaaacaaaaactagctggacatagtggtgtgactgtggttccagatacttaggaggatgaggtagaaggatcgtctgagcctgagaggttgaggctgcagtaagctgtgatcacaccactgcactccagcctgggcaacagagtgagaccctatcaaaaaaaaaaaaaaaagaaaaaaagaaaagaaaaaaaagaactacagtttttaaaatacaatatccaaataacaatgctgtataagctaaatctcttatgcgtttagtgtaataaagtatagtactgatatatgaaaagagcatatattggccatgctttagaaggtggtacttttgggcaacagaatattctagctcataccaaatgaatactgttcattgaactatattagttcattttcacactactgataaagacatacccaagactgggcaatttacaaaagaatgacgtttatgagacttatagttccacgtggctggggaggcctcacgatcatggcagaaggtgaaagacacatctcacatggaggtagacaagagaagagagcgtgtgcacaaaaactcccatttttaaaaccatcagatccaatgagactcattcactatcatgagaacaacacaggaaagacctgtacccctaattcaatcacctcccactgggttcctcctacaacacttggaaattgtgggagttataattcaagatgagatttgggtggggacacagccaaaccatatcataaagtaaacaatacacgtacaaaaagcccatttattacaactgaagtaaatctagtataaatgcaacacaatacaaataatactgtgaacaaaacatgactccttcctgatgccttcttcttagtggggggaaaaaaagaaaataaaatatgcaaataaagatgtaataaatgtcagaaaataataagttccatgaaaaacagtttaagacacaagaaattggggacacaaagagtagtgggtgagcagggtgctgttgtgaacaggcagctaaggaggaaagcctatttgagaaggtgacacctgaactggggaccaaatggagggagcaagccctgcaaatgtatgagagcagagcattccaggaagaaggcagagtgtgtgcaagcccgagttagaatgggttttatttaggaaatctgtgcagctccatagaaatgagcatggggagctgtgaaagaagtggggtcagaggagtcgtcaggactcagattatacgggactttttaagtcatgggaaagactgcattttattccaattcctgtagaaagtcatagagctctctaaccatgcctcaggagaaaacaaccacaacaacagtcaactgttgttttctgttgcttttattacttgttaatcaatgtttagcaatccattcaacagtaaagcaatttcagctgaattgactgatcacttctgtgactattcaaactggtttgtacgtgaacaaccagagtctacacttgaactagctaccatagaatgtggattccaaatcaatccacccagtggaatgcactcagagcatagcattacaatcatgctatcttcctctgaagttgtattaatatttttccatggagaaacagtgagtggatttgtcatagcataattccccccagaaaagccacagtggtttcacgaggtggtaaaagggatgaggaactcacatcttttttgtgaatctcagtttttgttcgatatctttgttttgtgtcagttaacatcacattttcttctttgaacatatggtgtcaataaggttaacatataaagatgttaagaaatgcaaattaagtttagtacaaaaattgaatgtcagctgcaggatttttcttgtaaacaaaaaataaaatatcccaatgagcaacagtgtttgaactctgaatttttggtaaaactctcttgctcatcatcaatgaggaaacatacttttgaataaagataaagagaacatcagtgacatcacctctacagatttttttttgtagccaattttaagaaactgcacagctctgcacttctaacttcatcatattccaggtagcctgtgctatagcactagctatcaaggtagagagacataataaaataaaagcagagctcaaccagtacttaaaattacggattgagtgccctattaacttgcagggattacattatgttttcaaaaagttgttttgtatcttgagagaaaagaaatgcatactagttttcatgtcaattacagggacttaattggtttgaagcaaagcatataatttaccaagacacgttgaaagaatcacaaagccaacctcaaaagtaaggctgcaactggtacccagccaacctggcctttcctcggcctctaaaaaagaaagagaattgtacttgtaaatgtttttatgtataatatttacatttagatcagaaaggaacaaatgggcaactcggccccaaatgtgtacaacatgtgggcagatgtcagcttatggggtcacttgaatggcattttatggccgaggacacacgatgcagcttgtttcagtccgtttgagcagcatgtcagttccatcactctttgctcttgggcatatggtgagacgtcattaacctgggagaccgacagacccatgaaagtggaaccatatgtgttgtaccaaggaaaaatttattttgcccaccattctactgcaaatataaatgtataatctctgccaatgattcctttacatattaaatattatgttaatgtgctggtacatgtacttccattaatatagtatttaggtatccaaactaagcactggtcagagatagaccccctgagtttgaaccagggaactcagagatgaaataatggggcagatggaccaaagagccccaggtgcatctttcatcagcatgtttaactaatgcaaagcaatgaaggcaaagttcttggtctgtcatcacaggggtcatatggaccaggacctttgatacttgacaccatctggagctactcttagctaccattaaacggggctatttaatgagtagagttcgaatatgctagctgaactttcacgttattcttttctcatttaatttcatacaggcttctatttccatatgcatttatgaaagttatcatggtataatgaattcttctgttgttacacttgaatctctttctttatcctgagtttaatgaattgttttatctgactgaggtacatttgcagaaactatttaaatgcttaagtgtttcttatgaaatgttgtactttgtaaggtttctgaaccttacaaattatatttgtgaagatgttttgggattctctagaaagttgggtacttattttagggcagtcagacttttagggctgtaagcttgccatatgttgtttgagtgtttggtaatcaagtcagattcacatgacataagatcagaagatcagagatggctcattgtttcaaatgattcaaatggcatcttttaagttaaggtgaagtcatttaatttcatctgtatttattgattgaatccttgtctagaaattttttccacaggttttaccaagtattcataatagcaaatatcatgtgcctcttctccaaaccaaagctatatgagacgcaaacgctaaattcagaatgagtttggaagaaactacaagggtgtttttgtacaaacatcatttttgtgttttttagattattttttattctaaaggcaatgttctctccatcacacaggagccacaaattggccctccacataaagattatttagcaaacatatgagctgtgtctcagtataactctatacaatgcgtgttcgtatatattgatgtttaatattgtttgtgttatagttcagtgggttataaaataaggcaacagagccctcatccatggaaaatttttctaacaaccatgagttcatcttcttttgaaaataacaatttccacgcataatcctaaacagcttttgctaaatttcaaaaaatcaaatagctgtatattgctgggatttcattttccacccctataaaaagataaagactagacacaggagaatgtatattttatgttcctgtttatatgaaatatcccaagtagcaaatggctagagacagaaagcagatttgtagttgcgtagggctaagagtagggatagagactgtctataaacaggcataaggtttctttttaggatgttgaatatgttctaaaattagattggggtaatggttatacaactatgttaatatactaaaatttattaaatcgtgcagataaaacaggtgagtttattgtattaaaattatatcacaataaagttgttaaaaatttttaaagatgaagggtaaaagccagagaatagttttgaaagttttctctcctctctcaaaatatcgcatttatagacatattttttctgatcgactattttaacacacaatttattttaatatttgaagacactatattctctgcaattatgtaccttgtttactttgtctatataagtaataataatttatttaagaatacattgctttgctattgccatgaaacaaattaccagcccagtggcttaaaataagattaagttttgatgcctgatgcatctatggatcacttaggggtctgttcatgaaaactgtgctcagctgcagtgaatcttctgcccttgaagcaagtggcattcaaggtagttcttccctgggtattggaagagttggaagagactggatagaaacaggcaaggtaacttaaggctccacttggatgaggtgccctgtcatatcacctctttctatttgccagtgcaaggaacataactggatccaccctcaaggaatggagaaatatactccactactcttcttgtgggaggaagtgaaaagtcaaatactgagtggcaaggatgctagataaattgttggcatccgtggagtatttcataagggaaaaggatgcagcataatctaatagtcactagagtcaatatgaaggcttggttcacttgattcactctaagactccaacggacttttcttcttttgttggagaaaaaaaaaattcccgtttataaaatgggaataaatatcttcacttttcagttttcattgcccaggaagaaatcagcaaatgtgttactgctacagaggagtcactgtgcttcctggcagggaggaaaagggtgtcagcaaaataacaaaataaagaaaaagtgtttgtgtttttggttcacatcttccttcttggctagtcataatgctattattaacctgctaggtaacagaaatttggattctttgagtacgagtgctcacagcagttagaaacctcattttcctctttaaagagttaaagtgtcctggtaaatatatcttctagtcctttactgttttctaaaacattgaggtatttccccagagtgcaagggaacaccagtccaaaagaaatatatcggttagggtctgcccattatgcaggagtctaggaacaagagagggggccaggttacatattaatgcttttattttcttaatattgtggtgattcatgcttcccagggtgctaggtgcttcccaaggatacagcagccttgggcttgaaatgggtcattttcacatcacagatccattttttcctgatttctgcctttgtctcctacattgtccctgtggcattttcttaattatttccagaagtttcatcttcaaaaatcagatggcatccatcacgctcatcctttcccgatccctgttcctgatctgatgatgcggctgaaggatctgatgctggtccatagtggggcccctctctctgccacacgctgctgcctttcctggtgactgctgctgcacttccactctaagtagtgtattgcagctcctgaagggctggcatagtccactgctctctgtagccacatcttgctttatgtaaaaatgaaaggaggtttttcatccctttgtgtgtaagtgtgttacctggaaaccaaaacagtgctacttctgcttcaattatgtgacctattttcagtgaatgatctcttttgattttttgcacttcagttctctgcttaggatgtaaacatgtcatgagctcaagatattttcagttttaacaaatgccagcaagttattcttcaacgtgccttatcaatccacaccccaccagcactgatgaaaaaaacactagcactaatgtgccttgacatctggggtcttaaacaacctgatttggtgaaggagcctctgagcccaagagcacaagaagtgggaaaggagagggtcttagctcttagcccttggagtttctcttagccagttttcttaggattctccagaggaacagaaccaatgggatgtgtgtacatatagaaagagattttctaaaagagattggctcatgtgattatggcagctggcatggatataaggaagaattgcatgctagatgcccaaggcagagctgaggtttcacatcaagtcctaaagctatctgctggcagaattccctcttgcttgtgggaggtcagtttttgctctatttaggccttcagctgattgaatgagtccccctcacattatgaagatcaacctgttttactcaaagtgcaccgaatcaaatgttaatgtcatctcaaaaccaccctcaaaggaacacctgaaatgatatttcatcaaatatatggacaccatgatgcactcaagttgatatataaaattgaccttcataccaggtatggctccagtgaatttcttatgcccatcaggagcagaagaggagtaggaaaaaacaccacgactaaaggggactcatgacctggaggtagatactcagcagtgacttgagtgggtggtcaacagaggactagctaaaatgaccttcttctggacacatgccagcatggatcaaggacaatcctcaatatctctcatcatcttggcaatatggaagcccatccatggtttactgcaattcaagggtaaagcttgttagagaaaccctgactttattgagatgacctttctcccaatggaagtaaatatggatcaacacagaattactaaacttggcactaaatcagagcttttttaaaaaagtgatccaagttacgctggaatcataggaagagagtggcttttcctgccccgattttagtgataacttcatggtctaaactggtcaagttattctgtttaggtaatatttgacttctccttttgtagaaggattctacgtgccagactgccaattgcagttttaccggctttatgtgaatggagatatcacctacccaacagcagagctggtctaataatactgaatatgttttcacagaatatcttataacatgtctggctgttgtttttgctatttgaccatggcccagattgctcagagatttattaagacttccaaagcagctgtccaggggccccaaaggaaggtgtgaagattagcggccttgagttggggttgttagaggatgtacttaattaatagtgacaagggattactggccccatcgccattctaggcgttgttgaaccacacaaactgacactggtttatttttgtttgcattattgagtaaactctcaaaactcagtagaattaagtctttccttccttaattcagcagaacctagaagcctcagttctcttacatttgccactgggatatctggaagtaaattgcttctggggttgtggatggtgggggacctgtcttgttcattccaagggttctttaatctttgttccttatgatagtgttctctactccacttttgtccttgttctcttttttatatcttaatcttcacagtagcaccttctgggcctaagtgtgacattaaagctaagccggttttaagtttctgccttagaatctactttcatatcagcaatggcaccgcacatagggtgttccatgtcatggtctccttttgggaatcctgaaggtgttacaataagacatgaactaataaagaattatcaaccccaaatcaaatattcattaaaaacaaacaactaaaatctctcttgatacagctttgccatgaattcccagctactttctgtctttcattagcgtatggtatattttgaaatatatatatggcttatccatttattatacatatatttattccttcatttatgaaatttgtggagaaattaaattcaatcttttaaaaatatttactaaagcattcactttggactacaatagagcttagggagaacaaagtgtgtcttgagtgttaagtatcttatgaatgactcctttgatttgctattactagtttagtgttttctaatagaatttaaacaaccaccatgataacttcatgcatcttgaacctttaggctaatgcctggttctttcttaaaacagctagtgagataggggcttgattactaaacccattttagtagtcagagaacttaaattagacaagttgtcacttatccaagatatttacccatactgctatgggaaaatcttcttgtatttataacagagtttcattcaataagagagtggtttgcaaataaggtggccagattcagcaaattaaaacacagaacaccagttgaatttgcatttcagataaacaataattttctttaatataaatatatcctacccaattcacaaaccacagtccacaaaattcaggtggcctctaaaggccatttctaggcttccttggtgggaggaggagggagggtgagcaaggctcaggatttcctcatccttttctctatttaatcagaaagattataagtgtctatgaagactttctttgataaaaggtctgtgtcataaaaagagggaggattttaaaacatttttctaatgctagaaggctttttgtccctattgtgtgataagagatttgatatgaaacaaataaggacctcaatggggtgggcatataaatttgctgagaattgaatgcgacctacattatataattttaaagtaattacctcaatttctgctgatttgaaacaaattttaaaaattcagttgtaaccagaaagaatatattttacacatttaaatgttcaactgtttaggtagaaacaaacttttttataaacaactctattcaaatcaatcaggaaatatgcccatatgcaaacacagctatgtgatatgtatgtcacatgcatttaaagatatatatgtatggctggacacggtgactcatgcctgtaatcccagcactttgggaggctgaggcgggcaaatcacgaggtcaggagatcaagaccatcctagctaacacggtgaaaccccgtctctactaaaaacacaaaaattagccgagtgtggcacctgtagtcccagctactggggagactgaggcaggagaattgcttgaacctgggagccagaggctgcagtgagccaaaatcacaccactgcactacagcctaggcaacagagcaagactccgttgtacataatatagaatatacctaaagaataataaataatacataaacgtgtcatatacttcatatataaacaaggccattcattcaggaaaatctagttataagtgaatgaaaaaaacaactacacaacagaaccctcaaaacaacaaaacataagttgcctacagttgtaaaactaaatcaatttggattcacctactgtaaattagcggcagaaaccaatgaaacctattcacttctaaagattttaaaaattatttttaattcttagaaaaatagaagtagcaaagactttttctaaaatcagagcacattaacctggtggttttagtggagaaaacatcgctataggtttgaggtttgggctcatcagcttggtttatgtaccaattgtaacacttttaaaaaaatggacccatatcaacatgtaaaatttatgctttggtaactgttcgtataaccatggcagcaccaatttatccattttcatgaaattatacctttccagttagagtaggaaacagaagtaaaaagatagtgttgactatatttcatatcaagcgttaggggcaaaaatggcatgtctgtgcttatatttgcactaatatatacaggtatttatgagaaaaaaagattcaaaaagaaaaagcatagaggaaaaagactaagaatggtgccgtccatcacaaagaagcatctgtctccagatgtgatgctgtatatcatatttggtctcttcccagcacagggtctgggcagctgcattcctgaggctgagatcctaggttcctgaagtatctgttctaattcgtgattctaggaaaacaacatttttgctgtaggcacaaaaatatccctgcacacagttcataaaacatctccttaaggggcactggaaagggagaggaaagcaggcgtggggaagcaccaggcaggaatgaatggtcccttagaatagaggaaacgtggctggtgccaagtcctgccggcggccacctccaagcacccctgggcacctttcagtgaagcacctctcctcctcagaactttgatcaataccctgctcattggcaaatttttctatagcaatgagtgtgccaaatctttcacatctccctatgactttcctgtaaagggaaaggatcggatgatcttctcagtacctgcctgtgcttatgttccaaataagagaaaatggtaattagttttcctccattattgtccttggtcaatcagggaatcagagacttaacgctattttttccacattctgtggatctatcaaggagagaagcatcagatggcattgcatacagacagaccaggaattgtttcctcccaggaaagaaattacctgaattcacaactgacacccacacatgttgagcttatgtgtgtatgagtgtgtgtgtgtgtgtgtgtgtgtgtgtgtatgtgtgcgtgttagggtatttttcatttgaatagcattgaatatatatatatattacatatatactgcatatatgcatatatatatatatatatatactgcatatatatatatatagtactgcatatgtattggccaaatatatatatagatttatgatctctgagttttctctagatgtctagaacttagactgcaggaataattcacgatctaaaatgtgaatttgaaaggcctaaagtaaagtgagcttcacctctgcattgtgttggtcctgtttccttctaacagatacaaaagtagaagaaattgctgcctctagagtatgtttcaagaagtcctcaaaggctagtgtaggcaaaataacatattttaaatgttgtatgagacatggaaaactctattactgcaaacatttggtttgattctgtgcctgttcaacacattgcccatttctaaatggtacctccctccagaactacccatagctgaataactctccatgaagccctcccatagtgggggttcataaagggaattgggcataaagaactggaaagaaatagttttactgtaaaggggaaactttgagaaattttgcttgggattccatgatttcacattcaatcagttttctattgctgttagtaggagcagaacttaatgttaataagtataattatatcatacatagagcactttatcatttacaatatttgatgaatcctatttttacaaataagaaaattggagcagtgagaaggtacaggaaggtactggtttttgttatcctctcgtggtaccattagcaacccagattaatgtgttttctttgtcaattttttcagtggtgcagatctgggacctgaatggcatcttggcctatcaaggaatgcacataccctgataaaaacatggtccctcttaagaaccactcagtctttcattcatggaaggggcagtgggaggatcactaggtaacctccatgatgtaaactcaggtttcaaaagctactcaggcagagaagcaaaattacgtctcaactcagactgatgtggattcactctacaactccaaatatatgaggtcgaaggacataatgataccatgccatatctgacctctgctcagatactacgttccacttcctgttgaatactaggcaatgggctaggtgtttaaggatagttacaacattggaacactttactattctagacatttttcatatcatatattttcattttgggatttaaagcctactccaggaaaagttgagattattctctttttcataagccacagaaggctcaattcaaatattgccaagttttatcaggtagttgaaacaagtagctgagagatgtaccagcattgttattttaagaaattaaacactgatatggaaaagatttgatggaatcacatcaaagcattaatagtgatcaagtctggatagtaaatgtatagattatttttataatgaaaattttccaccatgtcccaaaagcagacacactagtctaaagacctgccatgtacccattaccttacaggaaatattttatcttctgacttattctttttaacgctcatgttttccaaacaaacattactttttaataatcagaaaataagaatgataaacagttcagaaaattagatgaaagttaacatgtttttcttactctaagaaggctctcctttatataaagacaccaatgaaaagtcaatatgattgccccatccccagttctttccatcagaagattagtctcataaatttacaaaatgagaattggcagagtgggaaaaaactgtgggctgcagttctctgcctcccttctggttctggaagggccagaatttgacaagcccaatatactattagacaaacagcacaagtcccaccacccccattcagaagcttacctctgggctttgtatacaaaattgaagtttgggatttggatccatgcatgtgtatctggaaaagcgagtgtgaaacacctatcttgagccctccacccacaggcaaaaggggacatgaatcctaactgtattccatttaaaagacacttaatttagaaatgtgcaatatgttgaacaggcacagaaccaaaccaaatgtttgcagtcatagaaatttccatatgctgtacaacatttaaaatatgttatttgcctacactggccttcaacagcgagacctttctcttgagctaaaatgacaacctctatccagccgccagtactaacactgatgttaccaactggatgctgtgtgccctcttggcttccaagcaaggtgccaccctccagaactacccatcgcttaacaactccccatgaagctctcccatagtggggtttcataaagggaattgggcataaagaactggaaagaagtagttttacagtggagaactgtaaaggggaaactttggaaagttttgcttgggattccatgatttcacattcaatccgttttctattgctattagtagtagtagaacttagtataattatatcatagagtgctttatcatttacaatattacatgaattctctttttacaaataagaaaattggagcagagagaaggtacaggagtttcccagcatcacacagctagctgcacaaaacaaacaaaaaaaactactagaagacactcagcacccacttgtcttctagatattaacaaaacaaagcaaacaagaactgattcttgatccaaagcattatctggcctgagagagagagaaagacagacagacacacacacacacacacacacacacacacacacacacacacacacacacagagaaacaagatttaaggcaaatcatggcatgagcagagtcccattgacaattgctgcctaaaacatccttcctcataccccatgaagctgctgtagatgtcagtcaccttagtcctcttgactcagtgctgaccagtgtgtctttcttaagcccctgacatttgtaattcattcattcaggggcctcctcccaagcaaattctcctctctgcaccccagcctgcctgttgctttactctgccacctgaggattaagctcctgccctcctttgctttcctcagtgctaaattcttcgggctttttaaggtgccattggacaaatctgcattaaaatatgagggaaaaaaattaatagaaacatccagtcctactttccagaacaccagctgcacatttaaaaatttttattgaagaataatacacatacagaaaaaagtgaacatatcaaaagtatacagtgctatgaatgtcaaagtgaacacacctgtgtaaccagcaggaccaagaaactgaacattcccaaatttccaggtgtgctcctcatgcctccttccagtcatgactgcccaaccaaggatgctctctatcctgacttctaatagcataggttagctgtgcctagttaggactttatacaaatagaatcataaactatatctttctgtgtctgccttctttcactgaacattgtttttgtgtgattcatttgtagtattgtgtggcattgtagatatttttcccttattgctctatagtgtctaattctgtgaatataccacaatgtgatatttaaccattctgcaactgacatggcatttagtttgtttccagttcttggcaacttcaattagtgttgcattttagtgaatgcttttggtgaatatatggtgcatctttctgatgagtataaacttgggagtagactgcctgggtcataggtatgcatacattcaggtttattagacactgcccgatacagtttggatatttgtcccctccaaatctcatgctgaaatgtgatctctagtgttggaggtgggtctttctgaaaggtgtttgggttatgaatggcttagtgcccaccctgcaataatgagtgagttctcactctattagtcatgagagctagttgtttaagagtctgacaccctcctcctctctctcttgctccctttcttgccatggaacacacctgcttccccttcaccttctgccctgagtcaaagcttcttgagtcctcaccagaagttgagcagatgctagggccatgctgtttacacagcatgcagaaccgtgagccaaataaacctcttttctttgtaaattacccagcctcaggtattcctttatagcaacacaaagctagttaacaaactgctaaatcattttcaaagtggcttaatcaacttactatcctatcagcttatacgaaagtttggttgggccgggcatggtgcctcatgcctgtaatcccagcattttgggaggccactgcaggtggatcacctgaggtcagcatgaccaacatgctgaaaccccatctctactaaaaatacaaaattacccgggcatggtggcagatgcctttaatcccaactacttgggaggctgagacaggaaaatcacttgaacccgggaggcagaggttgcagtgagccaagattgcgccactgcactccagcctgggtgacaagagcaaaaccccatctcaaaaaaaaacaaagaaaaagaaattttggttggctgcatagcttgctaagtcttactatttcccttccttttcattttatcacttttgctatgtatgcagtgctatcacattgtggttttaatttgcatttgcagatgtgaattttaagagatgtttgtaggcatacttatggtaattcagtagtcctttcccaagaagtatgttacaaaaacggaattgtaggtattcttgatcaatattgccattatcctcaataatgacactattgacattttgggttaaataatcctttgttgtgaaggattgtcctgtgtcttttacgatggttggcagcacaacctgcagttgtgacagccaaaagtgtctccaaacatggctaaacgtctgtgagaagggagggactcatccttggttaagaatcactggtctagatccatttggtacattcttagagatgtgtcagtctctataaggtcttagagataacacaagaagtggggatgtctacacagaactagttccacaaaaacagcagtgtgcagcccaggatggcaagggaaggaagtctgtcaggacctctgtatatgtcccatgactcaggaggcagaagtttatttgcaacactttaagaatgtgtgggtgcagcgcaccagcatggcacatgtatacatatgtaactaacctgcacaatgtgcacatgtaccctaaaacttaaagtataataataattaaaaaaaagaaaattaaaaaaaaaaaaaaagaatgtgtggtcgccctttcaccaccaccaccaagattcttctgcatgctatccaacccaccttgaagggaaacacagtcattcagaaagattctagccagccagaacctgcccactagtgggaagctaaatagttggttagatgtaatttgtttttaaatttgcaatataaaagaaaagacaagttgccaggatatacttctcttatttacatagcttaaagcaaatatactttgaagccaattttttttttaatcatcaaggatgtgtgtgtgtgtgtgtgtgtgtgtgtgtgtgtgtgtgtgtgtaacaagaggagcaaataggtaataaagccttgaggtaaaccgagatgagtgttgagtctggctgtatattaaaaacattgtcaggctgggcgcggtggctcacgcctgtaatcccagcactttgggaggccgaggcgggcagatcacgaggtcaggagatcgagaccatcctggctaacacggagaaaccctgtctctactaaaaaaaataatacaaaaaaaaattagctgggcgtagtggcgggcacctgtagtcctagctactcaggaggctgaggcaggagaatggtgtgaatccgggaggcggagcttgcagggagccaagaccgtgccactgtactccagcctgggtgacagagcaagactctgtctcaaaaaaaaaaataaaaataaaaataaaataaaataaaaacattgtctaacgttgtttacaagtgtactgaggtctctagaaccaaaaccttagatttaaatcctggctctgccacagaatgttgggtcatttaattttatttaatctgcttgtgctccagtttcctcatctgtaaaatacagtttataaaatctaaactatctcataaagttctttggagatgaataagttaattgtcaaaaagtaacaattctgtggaactggtattattactttgcctcactaaaaaaggaactgtgttccaaaaggtgaagtacgttgcctaatatcacatacttaattttagtagggttaaatctaaaacccagtttctgcaggatttttattagacaagaggcttcaggtgtaatgcatagggcttgtggccatctctgctgcagacccctgagtcttgcaggaaatccataatataaaacccctaccctgctcccaaactacaaaaaccccaaatacctcaaccctgttttaaattttgttttaaactttaagtttttcaatgataggagatttttttaaaatctgtatcaattttagtaaccactttttcttaaataagcagtgcagataagccatgtcaaaaaatctactaagaaaaatcaagattgacctaatggaaatgaaaagacagaccaaattcaatgtattaaacatttccttcttccatactccctcagagtttattgttgtggttgttattacttaggttaatcaagctccctaaaaacacaatttctgcaggcaggttttttgggtgtaattttggcagagtggcatggtgagagtggagtgaggatggcaggatttgaaagtaactgaggaaaaagaggtggcagtgacattcgtacatgtgattttattccttgcaaattttgcaagacaagtggaatctttggatgatttttgaaaactatttgcaagacataattatattcctgtggaaagtatttgagttgggccaaccttccactgcagaaaattatgggagaaaatcagtgggcctttttgctgaataaaggctgacaataaggccttataaatcaattaaagtcagatttatacacctaaagccccagatcattctgcagacttcctagggcaattcagctttgttatccatggacttggccacaccaattgtcccttgcttaacactaaatctcagctgtctgaaaaatgaaattaaacacgtagaggcttttacactgaaactatttggaaaaccatgacaactctccccaaattaggaatcccatcagggtcagaaagagcttttgctaacaccaggacttcggagcttgggttcttaatccgggtctctgcgtttcagaaccctgttgtttgtttccatgaaggctttactagttttataagaataaggccaacaattggtcacacgcagcacagaagagaatccaagcacaacctgtgacagcaaggcaaccctacaagcttaggacctgcggcagatgccaaggtcttaggtcagccctctgtgtgaagagacaccttctgtcttctgaactagtgttcatattttctattacccataactgacccaatggctctgaaacttttctacaaacctgtcactgtgcctatagtccctctagccaacacattttagcaagccatcgttcctgaaggaaatatgctcaagttagaggggaggccaggcacggtggctcacacctataatcccagcactttgagagtccgaggcgggcagatcacttgaggtcaggagattgagaccagggcgaacatgatgaaaccccatctctactaaaaaatacaaaaattagctgggtgtggtggtgcatgcctctaatcccagctatttgggaggctgaggcactgaggcacgagactgcggcacgaggctgaggcactccagcctgggtgacagagggagactctgtctccaaaaaaaaaaaaaaaaaaagttagagacatagctaagacctccaacctctcagcattaaaaaagagagaaaaacaaaaggaggggcaaattcaaatagctcgttccttctaagccctcacctgactcactcacaatgcaagatggcaccaatcactaagcacaagctacaagtggccagatctgactagccagaatggaagcggccacaaccccaggagctctggtgctgtgttgagcactttggaaaagttgtggtaactctctcagacccaccatccctgagacagaaacttatctcctggattagtacaatggctccagatcctgtctacgcatgaggatcacctgggaagctaaaaatctaagcccctatgctaccaccaataccaatgaagtctctgagggtgggacctaaggaatatgtttttgaattttattgttgttgtttataatttccctaggaaattctgactgcaagcaccctttggtatgtgtaccacccacagaaacactgaacagtcccatctacagactcattgtgtgcagaagtatgtttatttaaaaaaattattttggaaggcctgcaaacaaccttcacctgttaaatattttccccttagtaaatatgactaaattttatttccctaagtgcttgtctcccacataaactgcttttacagaaactaaatgttattactcagagaaacacaccacactttgtaaaagcatcacacgtatcttatttggaggaattgtctaatgaagaaaagtacaatggcagaaatcaaaagtttcttcaagtcttaattctgtgagcctctcaaatacatatttttctttttcatggataatttgatatgtaaataaaaatgaaaatgtcactttactataactttttttttttttttgagacagagtctcactctgtcgcccaggctggagtacaatggcctgatcttggctcactgcaacctccgcctccagggttcatgccattctcctgcctcagcctcccaagtagctgggactacaggcaactgccaccacgcccggctaatttttgtatttttagtagagatggggtttcaccgtgttagccaggatggtctcgatctcctgacctcgtgatccacccacctcggcctcacaaagtgctaagattacaggcgtgagctaccgcacccagctactataacattttctagatggaaacatgaggtttgacagtgaaagcacaatgaatcattttttttcctgtaaattaccatcatatcaattgcatgtttgaaaaacaaacacatatgaatccaagtattttgttctgctgactttggtccacgtttcttgacttacaaaaaatttctaaattaaaaaattctagattaaaaagattttgtgtattctactttagtgccataatattacattgaaattttctaccacaagttacacatcactatatgaactaaaaaaaaaaaaaaaaagaaggaaggagaagaaacagaagaaagaaagaaaagaaaagaaaaaagaaaagagaaagagagacaaagaaaaatatttgtcagagtttcactgaaatctcaacatgcctttggccagcctcctttgttaagaagggtaggaagaataaagggtcagagaagtggttaataatccttactgaaattttgcctctattgtttctactgttccactatttctcttttttcctccaatcatcaacttttctactcatttcagagaaatgttgaacacacagcaagatggcagctgactacaagctaagagaagaggcttcataataaaacctatcttgctggcaccttgaccttggacttctcagcctctggaactgtgagaaacaatttaaattgtttagaccacccagttggtgataatttattataacagcctaagcagactaatataactagttatttggagacagagccagttgcgagaatctgagcagacgttggtagcgtcaacctaaacggaagaagctgaggcaaaattaacgtaagtagagagtttctttgggccaagctggaggagtgctaccctggagcatagactgaaattgccctgaatatatactctgattagtagcagtaacaaatgaatctgtaaaggcaaaagaggtggacagggagtgggctgatataaagttgtttgtcgggaattctcataggtttgcagaaataacattgatttgggattggctatacttgttaagccatagagtatgggtaatagtgactggggtgtcaaattattaggttaatttatagttactgtggcaagagcaaacaattttaagagatgaaacttaaaaggaagagtaggacatgattgctatctcattttaatgtctctctgtgcctgataatggaaagaacttccttttctcagatcaaatttattttattttctcaatagataaacatgtttatgatcactttgcttttttttcagcagttgatagtactctggtccttttgagactgcctttgaaaaattataacagtgagaaatctaacataattgaccccattttgcttctaacctcacaaactatctttgctcacttttgtgcataggctaagctaattatgggaagaatttagtttatcatttaactgacgaatttagtttatagtttaattttaaagcaatgataataatagtcccatttcaaagctaactccctccctgtcgggggaccaaaccaccaatgtaaagctaatgaaaagccacaaggttaaaattttgataggggcctgaatcctgctaagatataggcatagttgaacagcaagcagtcattgtttcctgtcttgctttctataattgcttactgcttaggagtcatgtagctctgatcacaagatttgtaacttccctaattgcccccattgataacatcactatagtgaaacctaagactagtctttgagatatttttcagattttgctttctgatggatcaactgataccacttggaccagtgatccccacccaggaactgactcagtgcacaaagacagttttggcagccctatgacttcatccctactccaactaatcagtagaacccattccttagtccccttcccacctaaccacccttaaaatccctagtctccaaattttcagagaagtaggtttgagaagtatctcctatgctcctctcttggccactctgcaattattaaactctttctctgctgcaacatctgctatctcactgtattggctttttctgggtggcagacaagaaaaacctggttggatgataacattttcactacctctaatccaacctaacatcacacaaatctcagaaacaaaagactgcttctgaatattccatactctgctatccccaagtcaagatacagtcgttcaaagattttgagaaaaaaattctatatctaacattgaatcttgaatattcaacttagatattaacagaaaattgcttctaaacctcaacaatattatttgtggttttacatttttaaaaatatcataagtagtgccccaggtacaacttgcttgcaaaaatctaatatttatttcaaaacccaatcaaacttctctgattgctcccaaagctatgtttagaaaatacttctcccaagattccaattggtaacctagctgggccttaatgattatttctttgaaaatatcagtaattataataatcactgaattagaattataatattagctaaactttgttaagtacttgccttgtgccagttaagattctaagtgttcccattaatttgtttaaccttcccatttatttgtttaaccttcacatcaatcctataaggctcacctgttactcttattatattcaaaggtggaaactgaggataaataacccacagaaagccacaaagctagtaagaaatagaatcaggttaaaacttgtcctagaatccacaggcttaaccattactcagaagatttttcctttttgcctggatgaaagttcagtggcttctgaagttggtttgtgtctcagagctcacattcttctcattgtttggaaagttgctggtacattatcttggggttacatccagcactttatggactctacccccaaactaccttccagttttctctctctagctaatatgaatcctatcttgagaggataatagacaacctgacattctcaaatatgctcaggatgtctctgcctttattatttattcatactgtttcctttaaaagaaatgcttattttcttgccattacctataaaaagctcacgtgtctttctgaattcagctcaaaatctgttgcttccatgaaacttaagctaggcttctttttggaattaattttctcctctttgattttattacgtatttatttctattctttcacttcaaagcttggatcttgagtataattaatcaaatgtttgcttatctctctcactgctctgtaaattccttgaaggctaagatgggtgctactaacatttttgtaccctccaaaggacttaagacagagcttctaaatgtttgtattaaaatatttttaattgaagtataactaataagagtgcactgattgcaagtatacactgtgatgaatgctcacataatgaacatatctataagtgataaattagattattgctagccctctggaagtcactattttgcccccattccccaataagataaccttcctgaattccacccacttgttagttttgtctactgttaaacattgcttgcatgggatcatgtagtctgtactttttctatctggtttctttctctcaacattgtatttgtgagatccaccagcttttgtctagaagtagtttgtaaatgtttacatagtatgtagtattccactgtgtgaatataccaccaagtatttatccattcacctgttgatggacatttagattgcttccaatttgaagccattatgaacagtgctgctatcaacattcctgtgcatgtctttgctatacatgtgtaagcatttcactggatacatacctaagcctggaattgagtcatatggcatacacatgctcaatttcagtagaaactgacagttttccaaaaggattgcatttccttgatgaacaatgagattgaacacttattcatatgttcattgactattggggtatccccctttatgaaatgcctattcaagtaccttctctatgcttatattgtgttatctttttcccattgacttttaaaaaatatttatacattgtgaaaccaaacattttgtatattttctctcaatctgtggcttactaaattcttttttatgaatagaagttcctaattttaatgtcatcaatgtatcagtgttttaattcatggtttatagtcttttgttacttataaaagaaatctctgtcaaccacacacttatagttttctatgttttattttattggtaatcaaagtggggtgtgttaaattaagtatagcctaaaactgcctccatatgtatttcaagtttggcctaaaggtttctctgtacactgtgaactgtaacctaactgggtgtgtaaacagactataacttactcttgtgccacatcactgaatgccagccaaccaaaggtagccaactgctcaaaccatgttcaaataaggcaaacacaaaactgtaaccaatctggctgtttccatatctcacttcccatattctgtacattgctttactttctctgtccaaaagtcttcttccatcacgtggctgtggtggagtgtctgaacctattctggttcaggggctgcctgattgaaaaatcattctttattcaattaatctctgttaatttgtctaaagttttccttttaacaggtgtggtatgtattttttctgttccatatgcattatccattgaccaaacatcacttactgctctgcagtgctaccttgcccaaaatcaagtatctccgtatgtatgggcctgctcctcactgcctgttctgctcaactggttcatcattccatcaattccacactcttttaatcctgcagttttagattgtttttatgcacagtagtgcatcatctctagctccatacctttacaggaattttagaatcattattgagcttattcactttcatatacattttagattcgtcctatcagttccaaatggattttttatgggattttatgaaatctattaatcattttgaggaaagttgacatcttttcattatgaacacattgtcctcaatgtgtttagattttctttaacttttttctcaccaaataccacatgttctcacttagacacaggagctaaatgatgagaagacatggacatagaagggtggaacatacactggggcctattggagggtagaaggtgggaggagggagaggatcaggaaaattaactaatgggtactggaacctgggtgatgaaataatctgtacaataaaccctcatgacacaactttacttatgtaacaaacctgagcaggttcccctgaacttaaaagttaaattttaaaaaaagaatatctgtgaatagagacttaaccagtattttgacaagaaatatagagattcaaatggaaaaatagattttctttaatttttctcaatgttttatggattttgtctaataatctttcctcattttcattaaacttaatcctaagtatttgatgagttttttgatgctaatttagatacttttaaaattaaaacgtttgttttgttaatgtttgcatatgcaattaaagttttatgctgatattgtatacaatggccttgctaaatttaattattgattgtaaatattttctgtatttataatgataccatctattagttttgacaattttatttcttcctctacaattcttatatatttttgacaccgttgacctataacagttgctaaaactttcagcataatgcttccagaaatgaggatagtgtctccttcccaatcccaaaacttcaatatttcaataataaataatacatttgctatagatatatttcaggcaacatttatcgtattaaggatgttattttctatttatggttattaaaaggttttttagaaattattattatgaatgaatatagaattatatcaagtgagtacgtcaagtgaaatgatcatatgctttttctacttttgttaatggggtgattactttgataggtttggttttcaaatattaaattaatattctatttctgtataaatccatcttagttataacatgttgtccttttcaatatttcaaaatggatttgctaatatttttcttagaatgtcttgcatatatatttataagggaggttaatctgtaattttcttgccatgttttggtatgaaagttatactgacctcataaaaagaattgggaaattatcagtttttctgttatatttacttttccattatatttttttcctttaaatatttggtagaattaccattcaacactgacttgtaatttttttgtgtaggactttttaaattctagatttcatttttgtaaatacataaaggactatttccttttttgtttcttctcatgtcagtactagtaagtttcatttttctagggattttattattgtaaattttcaaatttttagcttaaaattattcataatattctataatttattttcatagatctagagcaatgagtcattttcaggtatattatagcaaagcggactttatgtgagactgctgcagaaaagttccctcaatttttgcttccctaatagtgccattattttatcttcattgctgaagagtatttctaactagacacaacattcagatttgacagtgattttttttctctgcactttttcctcttctatataggtttatgtcgtttgtttcttttgagaagtcagctgtcagttgctttccttgttgctttgagtgtaagatgttttatttctgacttttctactcattgtcacagagtgggggaggggggtttgtccacaaaattttgttattcattgttggatgcagaccctgtccatattttaaattttaaatttgatagcatttaaaaatgttaatcagtctccttgttaaatttcataaatgcagctttcagagcagtgagaactttctttccttgtaggtttttattttcctcctctagaataaactgttagaacaggtaagagagctgatatatgacaaaaatattaaggcaccaccacatgacttcacaaagacctgggtccaggatagcacaaaaaaactgtggttcttcgtacatgtatgaaaatggctccaatattgaaaaattaggtaaggttaccaaagattcaagttatagtctggcttgactttgctaaggatattgtaattaccatgtgtgtctgtatgtttgtgtgcatatacatgtatatgtgtgaacatatataagaagtaaggagaattttgtgctcaaatcctcattgataactccttaataaaaatttaaaattactccctaaaatgatgatgaatattctacgtattttcgtttcactaatgtacattctctatttaactcatacatgtagttaaaatgcatgcaaattcactaatatgtgtttgtgtcagttgcctttaatgcaaaatgccatagggttataaaatagtgacagtagaagccttggagtgggcagatggtttgcttaaagtatatgtttctctaaaggttaattcttttcatcttcctaaggtactttatcatctttaaaactgtattattattctagtaatctttcaaagggaaatggtcaaactggacaacaatttatgtataaaggtgatctccatagcttattgataatttaaaatactattagcatctaagtatctaacacccgctataagtaaacaaattatggaccatctttaccataaaatgttaaattaaatattttttaaaacatgggacattatttctactaaaatgttaagcgagaagcataaagtactagaacattaaacacactatgatctcaattgatggaaagaaaaacaaatatgtaaagaacaggtattaactttgagaattgcaggtgatttttattttctttttagaaatatttatttaggccgggtgtggtggctcacgcctgtaatcgcagcactttgggaggccgaggcaggcggatcacctgaggtcagttcaagacaaacctggccaacatggtgaaactccatctctattaaaaatacaaaaattagctgggcatagtggcgggtgcctgtaatccagctattctggaggctgaggcaggagaatcacttgaacccaggaggtggaggctgcagtgagtcgagattgtaccattgcactccagccttggcaataagaacaaaactccatctcaggaaagaaagaaagaaagaaagaaagaaagaaaggaagaaagaaagaaagaaagaaagaaagaaagaaagaaagaaagaaagaaagaaggaaagaaagaaagaaacatttatttaatattaatttaattcattccaatactccaaaattataaagaaataatagttattattcactttataacattgcttggaaccccagtcatatatagaatgctctatgatcattctttcaggtagatcaatggtccattgcttaataggttatgccttatgtaacatggcaattttagagatttctatccttttaaagacaccagacctcacttccagtaaacaaagtggtgaataaggaaagaattcctttcaagtttcttacccgtatatcagcacaagggaagttcaagtaattagctaaagaatttaggccaaaatatgctcttaaaaaaaatactggatgttggagctcagtggccaagattatttgtcaatgttgatcaaatttaccagctggttgcttaacctctgctttttgtctgcctttgaatatacatacagcttcgggcagtcaaaggaatcaatactgccatatattcctatcactgagcatctgcgtttatagtcagtttgtttagacatcatgccagaataaccagttcaagagtgaaaaacataaccaaggaaagaaagaattgtttaatattataaaacttatcaatatggtacatctcattaattggacaaatacgaactaccacaaaacccatcattatccaaataaaagatgacaaggtattttaccagattaagtacctaattcttcttcaacacaaaagtggcaggatactatttaacatgataaagaaatacttttacaagccaataattagcacgatgcctaatgcaggtaagtatgtcaagtcagcagattacgtaagttcaaagagccaactggtaacatttaactttattttggaagtcctagacaatgaaatacatttcattgtaaattcaagccttgtatattataaagaagaaaataagaattttatcattattttaaataagttggttgtattagaaattccaaaaggttctgttgaaaatatattagaattaaagtattcagtgactcagaaggatcgtttatataaatctttatcaaaaccagaaagtagaatggataaaatctttcattcataacaggacatcaaataaaaaactctaaagtttctagaaatactcttaaggatatgtctcctgtgataatgttatgtagacaattataattctgaaacaaaacatatacttattatataatgacacacaccaagtttctgaataataaaaatagtcatattaaaagttgcataattgttggttttcaaataatttatttaaaatgtgtgaaataaaaacttataatgtttcaacagttaaaatagaattgtactaatatttaaagctagtcagtaagactagaaaggttgaacaaatcaacaaagaacagattatacatatgtatgtatacgatgaatgtatatgatactcatagataaaatgctaatctatagtatgaaatccataaaaacaaagccacaccagcaaaaatcagagagaaagaaaacagttcaatgaaaatttgggggaaactggtctgattattttggggaaatacctagtttgataccttttccatgccgtatatcaaagtaaattcaaagaagattaaaagtcagccattaaaaaatataatgtttaacactggaaaaaaaattaaagcaaaaagtgatcaaacctaaggtaataaaatgtcttgctaaatcaaacaccacggaagaaataaaaacatatttcatagatctaactcttgaaatttgtccatatgtaaacaaaattaatggtaatatattaaactacagtaaatgtgcaacaaatgttagtcatgaataatatctttatcatatacagagttcacagaaatcaatgagaaaattaccaagatcccaataggtaaatgagaaaagaataggacataatctataaaagggaatacaaatgtctcatgaaattagcaatagcattttattttctttttagttttaaaaatattcactgataatttttaaaaacaatttcaatttctccccttctctttcagtgtaatggtaatttttatatgattatattaatggtattagtaaaatactgactttctatatatgttagtgatctggagttcctcttcaaataacttgtttaagtaaaaacacaaatatgtttaaactattaattgaataacaaataatactactgccattaagttaactaactcacaagcagcaaatcaaatactgcacgtcctcacttataagtgggagctaaaccacaggtacgtacagacataaaggtagagataatattctctggagactccaaaactggggaggttgagaggggagtgagggttgaaaaattatctattgggtacgatgttcaatattggggtggtaggtacactagaaacccagtccccacagtgatgcatgtaatgcccgtggagcaaacaagcaaatgtaccctctgagtctaaaaatgaaaaaggaaaaagaaaagaaacgggcatagagaagttaaaaagcttgcctaaaaattactgatgaataatgagtactaaagtggttgaccctaggacaggattctttctaatacatctgtgtttcccaaatgtcttcctaaatggtgttcaaaattttgaaatatctgtgtagcaacactattttagatgagaatatccagtgttggtaagaatgtagttaaatgaaaagtaattattttctattcattcgtttatccaaaaattacccagtgtctaccttttgccaagtatttttcaggtagttcaaaagatcgtgtttagtattaccaagtttccatctttctcaaacatatatcctactagatgaaacaaaacaaattgaaagttaaaaataaagagtataactcatataaagataagtacgataaagaaaatcaagcaaaggaaggggttagagagtgacctagctgaggagtagggcagtgtcacgtgggatacttcaaggaatgcccctctaaggagatgacctttgggcatctagttgagagatgtaagaaccaagatatgaggcaggaatgaaggtgaaagttggaggaattacgcaggcctgcatgcttgggggagagtcaatgagtgagaattgcaagaaaggaagttacagagaaaggcaggggccagaccaggtggggctggctcaggtaaccacatctcattctcatgttggatgctgtacaaatggcaaaacttttctggaaggaaaaattggcaatgcttataaaaaaccataaaaaatcttatatttaactcagtaatcccacttatgggaatatattccaggaaaatcattctctctcatgcccaaaagtcatcagttcagacattaccagtctctaaaaatttcttatcccacctccctatctgtatcatacttcttcctcctggaggatgaactagttaagttgtttcagaaaaaaatataaaatgaagtctcttaggtaaaagctccttagtatctgaattctgacccattttatcttcatatacatccttgcctcctaccttccatcctctgtgggagtggtgtcctcctgctattctatttttaataattaaaatattattttactaatattcacaccaaaccagaaacattagaactaaacaaatcaacagggaatatgttgtacatatgtatgtatagaataaatgtatataatagtcaaagataaaatactaatgcactataaacatggaatcaaagaacaaaatcacaccaaattgttctactttgttcagtggactctgacccttgtctgtttcccggtctggaaactcactcagttgtttctccttaattatgatgttccatttctctgtctctaccaatcccttctctttgacaattcaactcaaaaacatcagtcatcattgaaaaaacaaggcaaaaacctcccccttctctatctctctcctggtcttcttaggcaacttttcttaattatctgcattattgactgtacttcttcactttgatttgctctcaaaatttccaccatcttggtcttgctcccaattgttgcagtggaaacctctctggaaaatacaagccatgtcctcactgtggctacatccttttctatatccaactttttgctgtggttagggctcaagtgtggagttgttcatagggagtacatcaagccactaagaaaatatagaatggaagttctacattttttattatcctgtctataataaggccttaaattaccttattttcacattcttggtggaggtattataaactacttttgaaataatatctgtaataccttagtttggattaatttcatgtattaaccctataaaaacatagaagtccagataatgggtcaacacataaacaatctgtgattagaaagtatattagtctgtttcacactgctataaagacactatctgagactgggtaatttataaaggaaagaggtctaacagactcacagttccacatggctgaggaggtcacaggaaacctgcaatcatggacggtgaaggagaagcaagtaccttcttcacaaggcagcaggagagagagacagagagaaagagtgaaggggaaactgccacttttaaaccattagatctcgtgagaactccctcactatcatgagaacagtataggggaaactgctcccacgatccaatcacctcccaccaggtccctcccttgactcgtgggattccagttcaggatgagatttgggtggggacacagaaccaacccatgtcagaaacaaccgtttctaaatataacgcagtgtgaggagttcctgattgcatagcaggaaggttgaaaacactgaggcttaacaaacactggctattgccatgaagagaaggtggtatgggttgaaagagagaagacaacacataaaataatatagaagagagctgaatacttatttttttcctaacttagtctaatgatctactgatctgtgcttgatgttttcttttgagaagaccactctttgttcttgtctaactgaagagtctatccccatgaatctgctattgtaaataggctgctttatgaaatgggaaacaaaaaaaaagtgttcacccaggcaagagatgccaccttctattcatttctgatgcatctagtttcctaacacttacagcttgccaaactgcaggataaagcacatagagtaaaattatacagacttgcaaaaagatttgaattcagggtattaatagcagaaggaatgttcttctgggagtaatctaagtgttatatttacctttggtttgagaatatttgcagtgaggaatttcaaatgcaaatattttaaaagcatagcatgttggtagagagacactgtgagcacttctgttttccttttaaaaaaggtttttcttgcctttttattggaatcttaacgagaccataattacgatagcaaaagggggaaaatacagctgttaaaagcttggtgttactgtatatatagtccctgtactatatttaaaaaaaaaatctgaaaccattcaagagagaaaaaaagatgatttagcaaagtaaatcttgtacacttatatttttggtatgcatgggtttttttcactgtaaatgttttgaaatttatcagtcaagtttcctcttatctgttcttttaattttaattgaaccataatacaaaatacttaaagaagacttaccttcatttttgtcacttccatatacacatccaacctccctttccatgttaaatgtaataagaaactatacatctccaaaggtcaaaggtccaattattttctagggtacactcctgttaggaagttatggatgtctgtgcatacaatatgctatgggggaagtatatcttttaacacaagacttgtgattacagagaccctcaccttctagtccgaagcagtatttgtatttccactatatttgtccagagaaagcattgtccctcttaaatagatgaacatgctaaatttgattcaattaattttatgcataataaagcttccaaaatggaaccctaattcttctggtgatgtgcagaccttaagaacataaatgcatttttacagaataaacagaatgctccaggtaaatcataatccaaaatgtacccagagtgattcatcactaacagtacttgttaactagatagaaatttttaactgcaaggtctggtagagatcagttaattcaaatctcttctattttcctttccttcaaaagaacaagaccagagtgttcctgaggctgaggattttgagcatgtgtagcataatatagagtagaaggtaacagtgggattgccatgatcttcccatgctcttcaaaacatgtgaaaaataggctgacttccctgatgaagaggatcaagtgatttctgtgctttcggatcttccactgtttgtacaatgtctcagttgtgcattccattgaatcatctaagagttcaatttatatggattagctcaacagtacaaaagatccaagacagaatctgctccaggttgtgagtgaagcatatttcagtttaggcactcacctgggcatctcggcctcagtaccataagttacaaacactaaacttcaggcaatagtaaaggatattttcatcaacataacatatgcttattttaaattacaatttcaatgtctctacatgttaacaggtgatacatatacgagttccaaatttgcaagatttcaatctgcttttcaatctcctatgcactttgaaaagaaatgatgcacttgatggattgcttcattgctaaaagtctgcttctgaccatagcaagagtagccccagatcaccaatcattgagagaagtggaactcaacatactgagttgtgacagggcgagtcttcaaatttccaggggacacttggcaggtgaaaagggttaaacaaagaaacagaaaaacattctttaagagtatttttcagagtaccagaagacttggaggttaaacccagctgacttgaataatgtcagtctctgataaatactcatttatctattggagataaaaaaaaaatctgctctttagctgccatgatcctatgttgcaggaaatttttagaggaacaaataaagccactttagtctcttaatataatgaccatcactgaaacatgtctcttctcattatttgcttaaccttattatgatctccaacattgacatctgatttttttcaagttacttgagggctgaacccattagtgtttcacttgaaccaattcggttcctccctagaaatacaagctggtaaaaaaaagaacgagtcttcccaagactgagatgggggtttcattcacaccaggtttgttcctgagtcattacttccagcatttctgcaagggcaccagacatttctccacatttgacacattcctctcaaattggatccatcatgaaatggtaaagaaaatcactaaaaccttcctgcatctcactgtggcctaaaagaggaaaaagctattattttgtttcataaactctgatctgcatgagtctccatcacacatcagcaaaacagtaacttctcagatttatatcttagaaggttaagtttctcagccctgtgagagttgacaactgtcattattttgagtttacaaagtcttataagacatggtgctcttggtttggtgacagtgtcagcttttatatatgacagatgaatactgcatgactccactaactcttggcagaaggctgttatcttgacaaaaataatacagcaaaagtgccttcaaagtgagctaaggttgtgttagagaactgggattgaaggaaaaagataaaagccacttttcatatatttaccaattgtagacagcagtatttattttaggatgtttttataagtcagttgctacattcagtggatgtaacatatccatttttatcccatgttggtgccaattatttttcagattcttatatactcaatctcccctctgcccaaccccacaacagctaataacacagtcttccgtttttttcccaccccaagaatcttatatctctcacaaagaacaccagctatgaggcaaaaggcactcaagccatctcctctcttaaagatttataagtgatccgaccttcctgagattgagataataatgactgacctgatatcattggtgctgtgagaaatatggatatgagaggtggtgtctgtggctgcccgatagggttacattgttgtcagtgccttgtcctgtttttcactctgtcttgtttgaatatggaaaaaagcagttgggtgctacatgtgtgtagtcaggagctaatgaaacacaggggtcacattacccaattttctgtgtgtgtgtggagggaatagggagtggttaaaatcttctgtttagcctctccctccattgcaacattatgtaaacctaggaactgaagaaatatccaaacaatctaaaagaagttgtagcaaaagtgaccatgtcttctgtggtagcccttcaaccaactcattcttcacccttatcaactttttaaaaaaatagagtaatttttaaattgtggtttcaaagtaagatgtatttattctggaaaaaattattaaaagcacaagacataaaattagaatagccccaacatccagaaataacttattttactcattaggggttttgtgttttcatcatttgtatgtgtgtatacattttaaaaaataattttgattatacttgacacattcatatcgtatagatatgtcttaggttatacttcatcacttaacaaatatcaatatgattcttgcaatctgattcttaatatcatgtatcactgtacattcatttagtcattcctcaattttttggacattaagtgtttttttttatatatatactttaagttctggggtacatgtgcggaacgtgtaggtttgttacataggtatacacgtgccatggtggtttcctgcacctatcaacccatcatctacattaagtatttctacattagcatctctgcggctgtctctgtcagagccaaagccttttacaacccgctaacctctgtatacactgttggtccatggcctaagggcattcatgcccacaggaagagtaacacaggttaaaaaaaaaaaaaaaaaaaaaaaagactcgtggattataactcaccaagctttaccggagaattctatcatctttacatccttgaatcctttctgtgtctctagaaccagatccacatccctctttgtcagctcacctcccttcatttattatcttgtcttcctgcatttgcacaaacttcccaaactctggcttatcttgttcccaagtcccagttcctccaagctaacattattctattgttgcccaggccctagcatgatgccctgctacaattagatagctctgccttatttctaataaccttttgctcctcccctttgagtaactttattttaataagctcagactgccataacaaaataaactgggtgacttaaaaaccagacgtttattttttcacagttctggaggatgggaagtccaaaatgaaggtactagcagggtcaatgtctggtgagggctctttccttgggttgctgagagctaccttctcattatatttcacatgtgggagagagacagagagttctcttcttataaggacatcaatcctataggattagagccccactcttattacttcatttaaccttaattacctcctaaaagccctatctccacatttaatcacatgggagttagagcatcaacatataaatttggggggggggatatcaactcattctataacacttctaaaatacagttttcatcattagtactttaaatatttcagatttcttcctagagaaaatttttatattcctaaaatgatggtaactccactctgataggtcagggttgcagacatagtacaactgagctgtactgatgagcaatgctcaattccaaaaatatgtagtctcatgaacaatcagatattcctttagttgactgtctcccaccttgtttctctgccttaaaacagcacacctcagacactgctccttagtacaaacctgtctggctcccaagtcacaaaacagcagcaaattttaattaatcaatgttttatggacataattaaaatatgcacttacaaataaaatgtcacacttaaaatcaagtaccaatttcataaagctgcattaatatttataaaatgattattgcagacaggcacattactgctcattagggcacacatgcatgcaagggtagcaaattcttaatcatcatgaagttgaaggctatgatctctcagttccttggccttgtcctaaaaacttccaaccttctcaggccttttttatgaataagcttctggcctttttctctaccctgattttcccttcccaaaagatgctaccttacgcaaattatccgttgagataaaaatgaagaactgtgtccttgacctgtggccccttggaatacgtgaagcaaaatgggcatccccagccaggggaaaaccgaacaacagcttccatctcttccatgaattctgccgcccacgagatgaccatttctctcctccaaatcccacccatagttgtttccaccagaccaccaccatagtctattattagccaatataaagcctgtaatatcgccatggaatttttgtaggggtaaaaatcacaaacttacataatagaggtgggaattgatttacattgccatggtgtgagtgctaaagcaatacaatattttagaaatatttattagcccaaaaggaaactttaaacagtaaaactgaactaactctaccagctggcaacatagcagaggagagtgaggacaacacatttggccaggcttatattcaactgagcttggagacttcacaatctcagccccttttggaggctcgtgttccttttatatgtagaatgttattttctgatgcagacagagcaagaaagtgctcttttggggcatttttgagtacttttgagcacatttggggcatctttggggctttctttgagccctttttgggaaatgctcctggggctccaatagtatctaatagcttcttaaaaaacattttaataagctaacttgaaatttatcagaaatgcacagactgactctctgtcaaccctgacaattatgtgttatgaactcagagcagagaaacatacagccactccataacatgcccacaatcttctatgggggctcatgtccccaccattagaatcatcccatagaattaagatttttatctctatggaaaccttcacctatacacagatcttgtgtgtgttgagtgagggctataacacattctataatctcattcttacttcagcataaattaaattatcagtgtatatgaatgagacaggaaaagcagatatgttgaccaggaagaaaaataagagaaattagagagatcaggcatttcttctatctgcctcagaaagcaagatggtgctaacaatgggatgtgctagagggctggaatatttgaggatggggtggcaaaaactggaaaaagatttttaacagaaagtcagagatgccaaagattaccttcctttttattcaggtaaactggtaggcatcatttgattaatggagaatattaaattcattttgagcaagcaaacatgaaagacaatcagtagtgaataaaatagcaatacatttacggaaaagaacatggaatttgaggtcagatagacacagctttaaagcatgtgtctttgttctactagctacgtaattttgagaaagccacttaaatttgagcatcagtttctttatatgtagagcaagaatactcctgcttttcagaggttgttaagagaattgtgtctggcatatactagacattcaagacctagaagctataagaaataagaagaaattttatattgttagaatcttctgattgtaaatgaagcatcctaaatttccatattccagacaaactatcctgtaaggtcgcgtaaggatgtggcctccactcacccactcccagcccatttttgtgccagtcttgccatggtcttctgggtaatcctgaaactaggactctctttctcaatcagccaacaagaagcctagtgagagccaaaggaggacaactgcagcatcagtcaatcagcaagtgtgggggactctggggacagaatttagaagatctcctttctcttcattacttgtcttctgtgtacaatgctttattaccttcacataagcaaagggcttggtggagagcagagagcaaatagataatataagaatctcacccccaaatttgctggttgctccttataaacttctaagttttatttatgcatcaacagccaccttgaaatatcatctgtaagtgtgctcagctaatatgttgccccttagaacttcaaattcaaacgtagaaacaaagccaccaagagacctataccccgcagtacctggctttcagaaggaaatgatttggcacgtgtatacccactttccaaagactggtaagcacctagaaactatccataggaatgtgtgcaagttcactgtggtttggcagatggtgttggtgggaatgtagctaaggacacagcctcactgactccagctaaaaaataaaaagtaaaacacatttaaattccctcaccagctcattttctacctctgtgattttgtgctcctgaaaatggtgattccatcaatgatgaaacatacaacactgacattttactcagcaaaggaaaacaccataaattccctgagaccccaatcggagccagacatataagtttggagtgtcctaatataaccgaaaaggaagccttgttgaacattgcatgtagatagggtgatttaggtgagatttttagtgttgtggagtaacactagcaaacacttttagattatcatctttaccatccgccagaccccaaatctactataaggtaagaaaaataacatgtggacatcctaagtagttattaggaactatgaaggaaccaaggtactcatttacacatatacaattatgtaaatggggttcatgtaacaagtgacttcactaatatgatgaacagcatctccagtggttccaagtccattgaagagctcaaaaaccccagtccctctgggagtctccccagaaatcagtctgaactagtccgctcttctgagctttcgccattcacagggctgctgtctcagacccagcttctatcactcaattggtaactgatttttgttcttatttgaatatgtagtatgtctctagctagctagttgtctctgcatatgtgaaatgatttaatagtaaaaggaaatatttattgtaaaactttaagaagataaacaagagcataaaattcacttattattcataactccactgccacaagttaattatatatatccagcaaaggatgtttacaaaattaaaaatgaacatgttctttacttttgttctttttttttctcacaaatcacactctatggtgacttcctctacatatcagtacatgcttatgcctttgttttgattatctagttcctctggtttgaggcttattttggcaatttctttggctactgacttcacctttccccttgttcaatgtcttgccatttcctttttgacttcaagccttcaggtaaagattgggttcttcccacagctcacagacctcctgtcagccaggtgaggtgttctcctgttgtgctggaactattctgtgcactgaatgccttcctgtgcaagttttgcagagtgtaacctacagaggcatcatgagttaggggaagacgattcataaccttttacacctttcattcagtctcccatacttaagcatcatcctttaaaggggattttaaaaagacataattacataaatttctcaagatcttttctttgtttacttcctttgtttgctgttactattattttattgtatatccaagaagaaaagggagatgggtataggaagaaccccaagatcttatttggtgaatattagtgccacaatgacctgatgttatggaggtatgaagtgtgcatgtatgtgcatatgtcacaaaggtgtggtgtgatggaaactagatgcaatgcataatattgaattagatctagaagtaggaaaaatgactacaaggatgttactgggacaattgatggattgtaaataagctttgtaggtaacaatatcaatggtaaagaaaaaaattccttattttggccactgttctgtaattatgtaagtgaaggtccttactcttggaaatatacatttaggaatttagaagtaaagggccaagatttctgtaacttactctcaagtggttaaaaagtaaaaattagacagatgaatggatgataaaatacctgtggtaaaatgttaacaattgatggatctcagtaaaaatgtatatataattatttcttgaatcttttatgtgagattaaattatttcaagataaaaattggccaggcacagtgcttcatgcctgcaatctcagcattttgggaagctgaggtggacagattagttaaggccaggagtttgagatcagcctggccatcatggcaaaacctggtttctactaaaattacaaaaattagctaggtgtggttggtgtgcacctgtcatctcagctactcaggaggctgaggcccaagaattgcttgaacccaggaggcagaggttgcagtgagcccagatggcaccactgcactccagcgcttgggtaacagagcaagactctgtctcaaaaataaataaataaataaataaataaataaataaataaataaataaataaaattaaaataaaaaattaaatggtaaatcctaattaatttaagcaacaaaacaaaaaaaagacaattttttttgtctaatggttcatttttgtcccttgaagttgtactaagcatattatcatttatcaggataaaaatcttccagaagtcatcaagtatagtttgtctcatgtttttctttgtttgtgttttgttttttgttctttttaattaaaagcagttgccttttctaagaaaaaaaaacatgttttcacttcctgttcagactatacaaacttaatctctatttctgggaagtgaatgaaatgtgcttgctggaaatttccctactccagaatttccatgaaaatttactggaaagataatgggcaagctcttaatttcttttaattgaaacgagagaggacagaaagttcagctcagattccagacatcataaagtctattctggaaatgaatggtgggtagattgaaacataaacacacacacccttacccttaaaccctagtctacagacagtttcatttttgttaagactgatatcatttgtgcagtttacggttttcagtaacatagcaacatttgctgtatgtgtaataacagcatctaaaatgacataataaaaaaagaattatctgcgattagaagtgaactgttaaaactactctggtcagcgccaaaaatcaagggagtttattatttcagtagctgcaatgaaaagcccctctgggtgcctagaaaacgtagccccttgagtttccacccgtcctcctcactgacacggtaatgggctttgttaaattcaaagacagttacgtcagcaatttgtggcctcttgtgggttttccaggcctataaagcacacaaattatacccaaatattggcctgaaaaattagtaagctataggatttgtgttattttagccaagctttactggagtgaaagaaacctagggaccttaaaactcagtagcctctttgctaccttattattttcttttttggtgggcagattctgagagttaatactgttgggtttttttttcatcattattacattattttttattattttgtcttgtgtgttaatacttttttttgcttcattattaattttttattattttgtcttgcgtgttaatactgttgtttttttgcttcattattacattattttttattttgtcttgtgtgttaatgctgttgttttattgctttattattacattattttttattattttgtcttggattgttttgtttgacatgcaagaaaacttttggcagatgttaatcaacagtgatcttataaaactattctttggctcttgcttagaattgaataattacagaaaaatcaaagttttcttccttttttagaaccttccacgaatatctctaaaaattataatgtctttgttgcaagtagcaaattcctggtttattatgtccatgcaattccatacatgaagcgtggtacagtcgttgaataaaaaatagagctttggctaagccaggtaagaaacagggcagagaatgaaattattactggttatcaactcttctgcattgatttaataaggaaaagcactaaacatgccgtctaaacatttggattcaagaccagatcagcacttaccagctttgaactactgtggagaaatttctaagccttattttcctcattagagtagtatccaggataatatttatactaacagtggtgtttggagaaacaaagcataacaaacgaacaaaaaggacaccatgttcaagggctctataaagctctctacaaaaagcggtgcttcctatcacacttagagatcctcaggcagggggtctggagcccaacctaactgcaacacatgaatctgacaagatgtattgctaataactcttatcattcatatttatgtgttgttagctgcagggagttagactccaaagattttcatgttatttatcatatagtaagataattatgattagcaatttggaaacataattgttaataaaactatgtttattttaagctgcttatactttaatatgacatttttcactaaaccttcacctattttctgaaattccattatttaatattcttttagtaattcccaaaaacactaataagaggctctaaaggtcaaaaatcaaggggaaaagaaggcattgttgaataaagttatttacatagttaatcaggagctaaaactcaggagaaatgcaaatcaccttgtttccagagagggaacagtagtatagtctttggcagaagttcacgccctagagataaacaaaagattttactttcttcctttggacttcttttgtgcatgtgttcttacttggtttcagtttttaggtttacagaaataatcttctgggtgaaccaaggtcaaaacagcaaccaggggtttaactgctgatcaagccaacaggatgtccaaatatttctcccaagcaataaaccatcagttaatggtgtcattcccacccataatgccctctagcaccaagaggaaatgtaccttcatttgctggccgtgtgtagaaatatccattctaaacacaatataaaactaatcacatcgagatttctagctttatccaaggatgaaaaagcccagtgaaatgcaggctcagcgtcttcccagttatctttccagccctcttttttactcaactgttacatgatctgggtgccttctttatttttaaaagacaatggggtgtcccagagaaggactttaggctaggatgtgtaagaacttcattctagtccactttctgcctctgtgtgatatcatacaagtcacttcaaaagcatgggtaaattctaaaaagtttgatttaaattctaaacactattttttattaccttctcccttgaaacaccctttgctatacaggttataagaggtacatcatcagaataaaccatgataaggacggcagaaagcaaaaagacaatagcgccaaaagggtattgtgttagtctgttctcccactgctaataaagacatacccaaggctgggtaatttataaaggaaaaagttttaattgactcacagttccacatggctggggaggcctcacaaccatggctgaaggtgactgaggagcaaagtcacatctcacacggtggcaggcaagagagtgtgtgcaagggaactcccatttataaagccatcagatctcgtgagacttattcactatcatgagaacagcacaggaaacacccacccacataattcaattacctcccactggatttctcccacgaaccgtgcagattattacaattcaaggtgagatttgagtggggacacagagccaaaccatatgacttgtgatggagagggatacagtcttagtaagtcttaggaaaccgagagatgtgtgaacagtcattcacaggttagaatgcccactatcattcacctcactaaactttcaaggctacttcatcaaaatttatgttaagttcatgttaggtcacaaatttgaagtttttcagattttcatgcaatcaccctttaactagcctattgctccacatctggtataattacttaactttgtattctgctcatcctggcccatctaatttttgggttctaattcttctcatcttcagatctgccttttaaaaaattacctatttccttattttgaaacccatagttatctattttgatgcttttcttgcaattctagaatccattatccctttgtctctcatgcaaattccccccaatataatccatttcccccctactgtttaaaatagtaggcttccaaaaagtgttaagaaaagtagaaaaacactgtggagtatactgccaatgtgggtgatcctaactcggtcgatccttgtctgcactcgctcttgtctatccttccaaccttcttcaatcacattctttgtagtgaccgttctaaacttaactgtgtgtttctaaatgcctgatactatttgttgtagttgaccatctactctggtggctctgtttattaactcaacattttactccttaccacactcatcatgattgctttgagttttgccatattcttttaagtccctaatatcatcatctcttcgtcactcaaagctaaaaaccccctctgttactttactgaggtttaagtgtctggcctaaccattctagctttatctcttttcaattatcacaatatccacttcactgattcaatattttaccgattcttcacacaagttttttttctattttcttcctttccttttaaatatttttattatgaaatattcagatactgataaatataaatgttatgattaaaaaaatacagtgttcttttctcttaccctctccttcacttaacttgatgaaaccctagaattttgttagttttaaatccatctttttaagtagtaaataatggaggaacaatagtctttctctgaatttcttctcaatccaattcttctctaatttctcaatctagaggtaaccaatatcctgaattgggtaccaattatccccatgcatctttctgtaattttacaatagatattttccattaaacatataaattgtgatacagagcaaaataaccccccaacatgttcacattccctttcttagaaactgttaatgtgttatcttacatgaaaaaaggaacttagcagatagattaaggttaagaattcaacctctgacttacaaactgaaatgattaatttacgttgttttaaggcactaaatttgtagtagtttgtgacggcagcccagaagagaaatacatatcaaattgttctgtgttttgatgccaaaaaaaaatgtatccatctttttgctttttgaaaaactcattgtaatgccttttggattaactcacgttgatatgtgtagctctctagttcattcactgtatcttctatgaggtcttataaatattacacaatttgttcattatcctccttattgagaattagaaggttttgttctgtgctttttaactattcaaatttttaacatgaactttttttttttaaatgaagtttctctcttttcacccaggctggagtgcaatggcacgatctcagctcactgcaacatctgcctccaaggttcaagcgattctcctgcctcagcgtcccagatagctgggattacaggcacccaccaccacacccagctaatttttgtattttaatagagatgcggtttcaccatgttggccaggctagtctcaaacttctgaccttaggtgatccacctgccttggccttccaaagtgctgggattacaggcatgagccaccatatgaaaagaaattttctttgatttttattctgaaattctctggttactagtaaaattaagcttctgaaacttttaggttctcttttagtgaatatcttgttcacttgtttgtttttcttttgggttgtttttcattttctaatggacttgaagtaatttataaattctgggtctaaatgcactgctgtttatagcttctaattgtatggattttctttttattttgttaatggtattttttccttgaaattatgttttatgtttaaaatggccacacttatgaatatttttcaattatggtttgtgttttttttcttgtttaagaaatccttccctgagatcataaatactcttttgattttttaaaaattagttttacacacacaaatgtttaatctacctataagtaattatagtattgtgttaactatattttttcagattaataaccaaagaatctaataccacttacacatttgtctttttcccaattaattttaaactacctttgtaacacataaagtttccatacatgtacggatctttctctggacccccattctatttcactgacttatttgttttcactcttgtgcagatatcaaacaggcctaattattatagtggcagagtgtcttgatatctgttgtgtgcttccactttattatttttttcaaaatcatccctccacttttggctctttgttgtttcatatgaattctaggaactgggattttaattgtacttaaaattaatgtattagttaatttggagaaaaaccatatgttttcacattattgaatctttccatccatgaacatggtatattttgtcattcagttagcacttattttgttagatatttttctagatacattatgtatctgttttctcaatgtttattgcaactatacagaaatgctaatgatttctgtatgttgagtattctcctggcaatcttcctgaattcttataaattccaaaactttgtggagtatatgaaatttttctagaagacaatcgtatcaaatgataataacaagtattgtaatctttacatcacttgtttttaaatgtattactttgttttgaaccattaattcaatattgagcagaaggattgctaacagagatccttgttatgttcttgaattgaaattaacagatttccttttgttgtatagcttttaaatataaggctttcttttgtttctattgtccatggaaaagacatataagttacagatcctttaaaatgtggtaaaaactgcctgtgaaactatctggcctcagttccatttggagggaagggtggtggtaggaaatactttttttttttttttggctaatataatttcctaatgttaatctaaacatggctatgttttgtgagtccaactgtgtgacttttgcttttctctaaaaattatccactccttccaagctttcaattgtgtgggcatcacctggttcacggtatttctatatagctttttgtttttgtttttttttgagatggagtctcgctctgtcgcccaggctagagtgcagtggcgcaatctccactcactgcaagctctgcctcccgggttcacgccattctcctgcctcagcctcccaagtagctgggactacaggcacccgccacagcacccggctaaattttgtatttttttttagtagagacagggtttcactgtgttatccaggatggtctcgatctcctgacctcgtgatccactggcctgggcctcccaaagtgctgggattacaggagtgagccaccgcgccccacctctttatagtttttaatgtctctaatatatctttaataaatctgttgcatgctaaaactgtaggcattttcttcttggggggcctctttctcaaaaacctcattgattattgtaaatcaagattttatgtgggtttctctcctgagctcttgttcagtgttgtcaattgcattacaaacatattcgacctaggtaggttacatcacctaaacccaacatgactaacattaaactttttgtctctatcaccacttcagaattacctccttctgaatgaggtcactgaaagtgataagacagtccctgtagtcatatagactcaatattttagttcactttttaacttctctgcccaagcttcagaattactgtgtctcaaatatttgtctgtttcttttccttcccgctacatagccctaaaattgcattttagctcctggtttctgaaccactctagtagctttcgaacttactgtactgtttctatacgttcctcttttgtaatacatatttctcatcatccacacattaatcttaaatgtgtgtaaaaatataaagacatttttaggctgggcacagtggcccatgcctgtagtcctggtcctttgggaggtcaaggtggggatcacctgaggtcaggaattcgagaccagcctggccaacatggcaaaacctcatttctactaaaaacacaaaaactagccaggcgtggtggcaggcacctataatcccgctactcgggaggctgaggcaagagaattgcttgaacctgggaggcggaggttgcagtgagccgagatcacaccactgcactctagcctgggagacaagagcaaaactcagtctctctctctctctctctccatatatatatatataaaaatatatatataaatatatgtagatatataaatatatatagatatctataaatatatatagatatataaaaatatatatagatgtataaaaatatatatagatatatataaatataaatatatatagatatatagatatatataaatataaatatatatagatatatagatatatataaatataaatatatatagattatatagatatatataaatatatacagatatatagatatatataaatacatataggtatatagatatataaatatatatagatatatagatatatataaatatatagatatatataaatatatagatatatataaatatataaatagatataactctatatatataaaaatatataaaactcagtctctctctatatagagagatatctatatctatatctatatatatagatagagatatatatatctatatctatctatatctatatatctatctatatatatctatatctatatatatctatatatctatatatatatctatatatatatctatatatatctatatatatatctatatatatatctatatatatatctgtatatatctatatctatatatatctctctatatatctctatatatatctctatatatatctatatatatctatatctatatatatctatatatatatatctatatatatctatatctatatatatctatatatatatatctatatatatctatatatatatctctatatatatctatatatatctatatatatatatctatatatatatctatatatatgtctatatatatgtctatatatatctatatatatctatatatatatcgatatatatctatatatatatctatatatatctatctatctatatctctatatctatatctctatctatatctctatatctatatctctatatctatatctctatctatatctctatatctatatctctatctatatctctatctctatatctctatctatatctctatatctctatctatatctctatctctatatctctatctatatctctatctctatatctctatctatatctctatctctatatctctatctatatctctatctctatatctctatctatatctctatctctatatctctatctatatctctatctctatatctctatctatatctctatctctatatctctatctatatctctatctctatatctctatctatatctctatctctatatctctatctatatctctatctctatatctctatctatatctctatctctatatctctatctatatctctatctctatatctctatctatatctctatctctatatctctatctatatctctatctctatatctctatctatatctctatctctatatctctatctatatctctatctctatatcgctatctatatctctatatctatatctatctctatatctctatatctatatctatctctatatctatatctatctctatatctctatatctatatctatctctatatctctatatctatatctatctctatatctctatatctatatctatctctatatctctatatctatatctatatctatatctctatatctatatctctatctctatatctatatctatatctctatatctatatctatatctatctctatatctatatctatatctatatctctatatctatatctatatctatatctctatatctatatctatatctatatctctatatctatatctatatctatatctatatctctatatctatatctatatctctatctctatatctatatctctatatctctatctctatctctatctctatatctctatctctatctctatatctctatctctatctctatatctctatctctatctctatctctatatctctatctctatctctatatctatatctatatatctatatctatatctatatatctatatctatatctatatctatatatctatatctatatctatatctatatatctatgtatatatctatgtatatatctatgtatatatctatatacatatctatgtatatatatctatatacatatctatatatatatctatatacatatctatatatatatctatatacatatctatatatatatatctatatacatatctatatatatatatctatatacatatctatatatatatatctatatacatatctatatatatatctatatacatatctatatatatatatctatatacatatctatatatatatctatatacatatctatatatatctatatacatatctatatatatctatatacatatctatatatatctatatacatatctatatatatatatctatatacatatctatatatatatctatatacatatctatatatatatctatatacatatctatatatataatctatctatatatatatctatatatatatctatatatatatctatatctatatctatatctatatatatatctatatatatatctatatatatatctatatatatatatctatatatatatctatatatatatctatatatatatctatatatatctatatatatctatctatatatatatatctatatatatatctatatatatatctatatatctatatatatatctatatatatatctatatatatagatctatatatatatctatatatagatctatatatatatctatatatatatctatatatatatatctatatatatatctatatatatatagagagagagagagagagatatttttgggggactacaagaagggggagggagagaggaggacaagggtagagaaactacctattgggtattatgctcactatctgggtgatgggtttaattataccccaaatgtcagcatcatacaatatatccatataaaaaaaaccctgcacatgtaccctctgaatctatatatatacacagagagagatttttagagttatacaataatttattatctacacagcacatgtaaggtagatagaaaatgcattactagttccacctttatcaaatgtaaagctggaggtttagatttctcttaccttactaagaaaactaaacatcaaacccaagttgagtttattaaccttcatgatgcagaatcccaattttctatatgaaactatgagttctcttatggcaggagttatgatttctgctattttctcaaatactctcaaactcggtgtgtcgctgtagaaggtgcccacaaatgctgagccaatttttaatactttgagaaatataggactgacgtatttttgatttaggaagcatgttaggtgtttctgttatattatctcactgggaagtgtaccacattgtgaacaaattgttattttgcctattactcatgaaaaatatgtgttccgtcagaaagttaacagagaactaacctgaaagaaacttcagcaccagcaattttaataagataaataaaaaatagagattcaatcttatctactcctactgtgtcattctgaaaagagatgaaagaaaaaataatgaaaacacattttcttagtgaatttaccctccctccagccccaacacatatttaattggttccatgatttatgtagtgtgttttacactcttttttccacccactcacaatattacaaatattaatcatttttccttggtcaattataggaattaaggcttggtgttgtgtttgttcataggtaatatgacatcagataaaaccatgctctactttttgttctccccacccccaaccccagctgttcatataccattttctgctttctaagagaaagaataaaattaccttggtaaagagctatgttcaacaaacaaacaaaaagaaaagaaaaaaaaacctattttggaaaatacctaagaatgcgagaagctcccagagattgaaaatgtttttcacacatggacagattatcagaggataatcttacatattgaagttgctgaaataaagaaggcagtagctgagaacctaccaacataagctaaggagcccattgtttctgctattgacagcactacctgtgtgtcatgttgcagtctcgaggtcaaagatactgaaggaaactgagcttctctgaattcaaacacttcctccactcttgttttaaatgtgatccagaaggatggctctggagtagggttactcgatggaaactcctaaactaactcaagaaggaggacaaattacataaaattaatagatcaacgaaactgcacagaaagcaggagtgtgctattcagaggaactgcctatgttctttcttcctcgattaatgaaaatatttctatgattttcctcagtttctcagctggtatgtaaattgtatatttttcttcagtaggatcagaaccaccggggaatttggaatcatcccagaaataagtacgcaaaccaacctcttacatgttagcaggccagtggtcttcagggaatcatctatctaatgccctgtttcagtcagaacaaggcagattattcttcaatcatcaagaacagctccaacactcagtggatgaaaatatattttttactcatcctacatattgcataagaaaatgactgtcaggaggatttacacattacagtcaaacagaaatgtaggttaaagaatgctccatctcaacttgtgcttctaagattacccagacagggggaggaactacggaacatgtttgctcatggcagcactattcccaatagcaaagacatgaaaacagcctaggtgtccatcaatggcagattgcataatgaaaatgtggtacctatacaccatggaatactacacagccataaaaaagaacaaaaccatgtcctttccagcaacatggatgccgctggatgccatgatcctaagtgaattaatacagaaacagaaaaccaaatactgaatattcttacttataagtgggggctaagccctgggtacacatggacataaagttaggaacagtagacattggggactacaagaagggggagggagagaggaggacaagggtagaaaagctacctattgggtattatgctcactatttgggtgatgggtttaattataccccaaacgtcagcatcatacaatatatccatttaaaaatcctgcacatgtaccctctgaatctaaaataaaagttgaaatttaaaaaaaaaagaattcagcagaagtgtaacataacattcactcccatttcatggcctaaattcaagaggggcaaggctgtgcaatccgatcaaatgctgagaaagaaaaaaaaaagctgtaataaatgtgagcagatttaatggcctcattccacttcatgaaaattgtctaaatcatgtccttcactattgtcctcatcccaaaatataaataattactgtacatggaaatcgttttagactgaacagacagaaaagaagatgggtacaaatatcacataccacagaagtatctcctaaagcaattcaagaaatagaagcctggatgatatccaattatactgtatttagtcttttgcttggacttttcttcttccttccttttcaatcaatcaacaaacctcttcctggtctatgctcgtgatgttttttttctcatatttttaaaatatttcactttcagcctcctgatgttacactgtgcattctttggaacaacatcttatattcagtaaattcccctgtgatattttcaaagctttaaaggccttaatgacattaattcattaactttttatactcaaaaccattcctgaactcatcagttttgagccctgagtatgttagggcaaagaaaataaggacttaatttctgcctttgtagaattacaacttccccagagaaataattcataaacaatgaacaaacacaagaaaaaaaaataatgagaaaagtccaacataatattgtttcaagttcctgtcactaatattaactactggcatatcttaaacccctactgatggatcatatatgaacagaaacagtgctttaagaatgacaagttgaaattttctgaaactcgttgcctacaatcagctaacaaagactgtaaaagagtttacttaacgtcagaaaacacagaatgcagcaaagcctatagagataggaaaataatcactatgttcacaggcagagaaattatggctctttcaatatctagatggcaacaaaaatgtgttgagcttttgatatttacctaattatttcagataattattgaaactgtgtaatcaagctaaacacacttatcagaattgccctggcctgtccttttgtgtacatactgaaacccttgggctttcttttctactctttatatacctacaaggtgttaccttcagtttcttaattgaatcatggttcaaagtgtgtgtgggggtggtgtgtgtgtggtgtgtgtgaatgttcatgtgtgtgtgtgtaattttttgaaattcttcttccaccctcaggagtcccctgcagtgaactggctgccttgccttttattattcctttactaaatgctcagaggaccatatggatttggctgcttccatacaaacatggaaaaaatacttccgtgcaaaaaatatttctttttattctgatgtgggcatgagaggacagccaggtagttgagagaattgtctaatatatcctcctggcatttgtcagcggatacaaaaaccctgataacttatgttagcttatcacatagtcaccattgcatctacatttgagaaatcagttcaattcttcagagcgtgcttgcatggaaagagaagtcagaaattatgaggctcagactgaagaattagaaacagaggtagacagaaaatatagactgtataaggccactcagcaaagccctctggttttaagggtcactccattaccctgattatttactaagtatataacagagaccattgaattatagtagattagaggtttatggtttctatagtttagtgtgccactaccatctcttagaatagtgaataaaattggcactacattgcaaggaaacttgaatcgacatgctttcattgagattcaaagtgaaatccagaatatattatattagtggatgtatctttttgttcttttaaaattggtgagatcccttttctttagaagtaagaaaaaatgtattgttacttcttagacacgtttctgttctttttctttctaggttattctgttccattctaaataggtaacatttccatgaccattattctcaaaagtacatttaataatgttcaaaatgtttatggcagcatagataagcatgaggtaacaagccaggtggcaagaaacattgccctctcgttgtttataacctaagtgtagtctgacaccaagtcccacgtacaaaaaagactgggaagagtaaagtctagtgcttacattgtgctggaagtctcttgagattatcaactttacctatttgttcccatgcagacataaccatccctggagactgccttttcacctaactttcaaaatgctttaattattaaagacatggcagcttgcacacaggtcatttcctcatcatcttctggaactttaaaaatctctcttctaaaaatagaagcagaggtgaagagaaaaggtttagtgtttctatgacttatccataattgaattctcttttataaaaaataaataggacaacaaaaagtaagtctttactactactttcttcatatacttatttgttcacacatgatctaagaagccttttataatcattgtaccgacactggctttttgacgacagaagatcaaagcttccccagtttgggagcaacttttctgcataaataagtgcagcatcagtgtattttgaggctatgtaaagaaccttaagttaaccagtaaaactgagttatttttaaggaagctgatgtcaaggactggacccagagactcaggatattacaatagacaccccggctccccagcaaaaaccctgcaagagactttgtgatatttatgtttaaagactgcaccagcaggacaacctttatgaggcttttgcaagtgaagtacaccaatcatgagtagaaggctcagctcagtctaacaacgtcttatctttctcttcgtcatttataggatccctgttggcctctgagtattgtctgtggactggaaatgtatgacataaatctttgctagtctttttaaaagagactttgattgtctcaagggagagtatcattgggtcagttccatccaggaacctcaagtcattatagcataaagaatataggtcatatttatcgtcagagtctggataaaccttttctaagtatgatatgagtcttcttcactgagatacaaacatttctttcctaatcactaattttatgtttagttttgttcttagaggaaagtaatatttagtgggatggaaggtaatatctttgtggctctttcttttctcttccttttcattgtcacacatgtcttccattgtcccctgtctctgcagcatgttcataaaatttatatcagatcatcttacaatgttactttctaggctttttagtatgtattatttttcccacaaaagagtgtatttcctgaatatctgattcctgtttataatctactcatctattgttttccaaaatgcctgccaacaataaatgcatcataaatggttgttggctaaatgtatgaataaatacagttgcttttttaaaatatgtcattcacatctttctttaaaaaaatcaggagaccttaaacctccccctttaactctctattgtttcctgaactgaatgctgtctttcacatcctatccctaacactgtctacaatcatttccctataattccatgatgtccctgtgttcctgctaacctgaacttctttttattcctcaaagaaaatgtaatcttctataactttgaaagttcttcctgtcttttccatttgtgaatgtaaatttaaccttcaaaatacagatcaaatgttaccttcttgtgaatacttatttggttctccagagtgactcttcgtgagtacttaagtgacgctttgtaactatctccactgtatcaatcacactggaaatgcaatagtgggattatttacttatttggcatcccacaaaaaacacacaaacaccacacataccgcatacaaacctgagcatagatattatatcttatttcttgtatctaactaagcacccaacatagtacttgaaagataattaggtattaaatgtgtatttgttaaatgaaagaataattaaaatgatgaacgagtgaatgaatagaataggaatttaggggctggcaaaaaattgacctgttttaaccacttctagcttttgatcttcagaaagtgtcttccctttctggagcttccattttttcatctctaaaataggatagtacgtccataatagagctgtgataaagggtataaaagataattcatggaaatacttggcagtgtctggacgaagagtaagaagtaaaagaagaggaagaagaaagaggaggagatataggagaaaaagaacaaggagaaggaggaaaaggagatgcactaatgataaacgcatttaaccaaaagtgaatggagaagcaagaataatgtagccaaaaacccaactaattaaagggtaattcttgtctggagctcccattagattgtaaaggaaaaaaagaagaaatagtgatgatgatatggtttggctgtgtccccacccaaatctcatcttgaattgtacttccataattcccacatattgtgggagggacccggtaggagataatttgaatcccggcaggagtttctcccatactgttctcccttggtagcaaataaatctcatgagatctgatggttttatcagaggtttccacttttgcatctctctcattctctctttgcctgctgccatctatgtaagatgggacttgctccttcttattttctgccatgattgtgaggcttccccagccatgtggaactgtaagtccaattaaacctcttttgtaaattgcctggtctcaggtatgtttttattagtagtgtgaaaacagactaatacagtaaattggtaccaggagtgggatgttactgaaaagatacccaaagatgtggaagtgactttggaactgggtaacaggcagaggttggaacagtttggagggctcagacaaagacaggaaaatgttggaaagtttggaatttcctagagacttgttgaatggctttaaccaaagcctaaggagatatggacaataaggtccaggctgaggtggtctcaaatggagatgaggaacttgttgggaattgacgtaaaggtgactcttgttatgttttagcagagactggcagcattttgcccctgctctagagatttgtggaactttgaacttgagagagatgatttagggtacctggtagaagaaatttctaagcagcaaggcagtcaagaggtaacttgggtgctgttaaaagcaatcaattttaaaagagaaacaatataaaagtttggaaaatttgcagcctgacaatgtgatagaaaagaaaaactcattttctgaggagaaattcaagccagctgcagaaatctgcataagtaacgaggggccaaatgttaatccccaagacaatggggaaaatgtctccagggcatgtcaaagggcttcacggctcccatcacaggcccagaggcctaggagtaaatggtttcgtgagtgggcccacggtccccatgctatgtgtagcctagggatttggtgccccacatcctagctgctccagctgtggctggaaaaggccagtgtacaactcggactgtagcttcagagggtgcaagccccaaaccttgacagcttccacatggtgttgagcctgtgagtgcacagaagtcaagaattggggtttggcaccgcatattctcacttataggtgggaattgaacaatgagaagacatggacacaggaaggggaacatcacactctggggactgttgcggggttgggggaggggggagggatagcattgggagatatacctaatgctagatgacgagttagtgggtgcagtgcaccagcatggcacacgtatacatatgtaactaacctgcacattgtgcacatgtaccctaaaacttaaagtataataataattttaaaaaaaagaaaatatgtgaaaaaaaaaaaaagaattggggtttgggaacctcttcctagacttcagaagatgtatggaaacatctggatgcccagacagaagtttgctgcaggggcagggtgctcatggagaacctgtgctagggcagtgcagaagggaaatgtgggttggagtccccacacagactccctactgggacactgcctagtggagctgagaagagggccaccgtcctccagaccccaaaatggtagatccactggcagcttgcattgtttgcctggaaaagccacagacactcaatgccagcccatgaaagcagctgaaagggaggctgtaccctgcaaagccacaagaacagagctgcccaagaccatggaaacccgccttttccatcagcatgacctggatgtgagacctggagtcaaaggagatcattttggagttttaaaatttgacttccccgctggattttggacttgcatgggccctgtaacccctttgttttggacaatttctcccatttggaatggctgtatttactcaatgcctgtacccccattgtatctaggaggtaactagctttcttttgattttacaggctcataggcagaaggaacttgccttgactcagatgagactttggactgtggacttttgggttagtgctgaaatgagttaagactttaggggaatgttgggaaggcatgattggttttgaaatgtgaggacataagattttcgggggccaggggtgaaacaatgcgatttggctgtgtccctacccaaatctcatcttgaattctactctcataattcccacatgttgtgggagggacctgttgggagataatttgaatcatgggggctgcttcccccataccgttctcgtggtagtgaataagtctcatgagatctgatggctttatcaggggttcccacttttgcatctctctcattctttctttgcctgctgccatccatgtaagacaggattgtctcctccttaccttccaccatgattgtgaggcttccccagccacgtggaactgtgagttcaattaaacctctttcttttgtatatttcccagtctcagatatgtctttatcagcaggctaatacagatgacaaaagaagttgtcatatatctgctaagttcagttatccattctaaatcttttaaactattgcagatattcaaaagaatggacaggaatttaaaaagaaaagtagttataatatgaagtgataaatgtgtaagagtttgtctccttaaaaatgttttaataaaaataaaaacgtcatttaaaaatattactttgatggtgttcttcattgggcagatgcctactgtggggacaaagtatcaaagcaatagtcccaagacattgttaagaataggaggagcttaaaaaagtttgacagggaattatatatttttttttaattgccatagtacattgtcacaatcattagaggcatgtttcaaaggggaatgaaggaatggggctttccagagagtcaaatttcattaaccaaaacgatttctgcatccattgttacagcaacatcaaagccattgaaaatgaataaggtctcacgaagaaatttttaaatggattaattaggggattttagtgtaagagtaggagtgtggttcagggctcattccccagggaggggtggagaggaaagagagaagaattcttcaaacttttgaacagtctttatctccaaataagtgacatttagtcaactgtgggctaggagtctccagaagcagccggagctaacttcttacatctcaagtcaccctttgctactaaccaggaaagtctgcggcagggtagagaggcggatatcagtttaaatcctttacaaaaagccactcctggccattactgcagggaaaagtcccgcagagctgagcagtcatgatgtgtgacttcaccgaggaccagaccacagagttcaaggaggccttccagctgtttgaccgaacaggtgatggcaagatcctgtacaaccaatgtggggatgtgatgaggcccctaggtcagaatcccactaacactgaggtggtcaaggttctgaggaaccccaagagtaatgagatgaatgtgaagttgctggactttgagcactttctgcccatgctgcagatggtggccaagaacaaggaccaaggcacctatgaagattacgtagaaggacttcaggtgtttgacaaggaaggaaatggcaccatcatgggtgttgaattctggcacgttcttgtcacactgggtgagaagataacagaggaagaagtagaggtgttggtggcagggaacgagggcagcaatggttgtatcgactatgaagcatttgtgaggcatatcctgtcgggatgactggcccatggggcagagctcgtccttacggtgctgaatggctgaggaccttcccagtctcccagagccatgttgtcttcccctggtgagattttctatctatcctgaaggctccctaggctctcttatcacagcgcctttcccatatattctctcttggatgatatttgccgtcagcattcatcaaataaacttgctgtctgtgcctccacccaaaggaagccactcctatactcatacctgccatcaccacgtagaacatccttgttgcttagaagcatctaaataggacactgtctatacacactcatgcacacatacacgagagaatagaaatttatcccgtgtcctctctacttcctcaaatctgtgctgaacaaacactggcagtgccaaagattctagaacttaaatactattaagtcattttgatatcatcagagtcaaaagtgaaaaaaatattgagagacaagtggctttaaggatgctttgatggcccctaagtcatctgtttatttcaagtgttgccaatggtaaaaagaaacttcttcagttgaaattaggtttggtttccaaagtattctttcaaataaaaagaatcaaattatcaacctaatttaaaaagctactatatacacatgtgtacatgcattctacttatgtatgtgttcatgtgtgttcacttgcatgctacatacacacgcaacagacctacagcaactttcatcatctttcaccccactatgctcgacaacatgatttacacatagtaggccttcagccatttttgaaatgaagttatggatgttgtaatcaaagtgcatacatatgaccacatacatatagttactgacatcaccataaaagtgattgatactccctcagagagctttcagtttccaaagtatatgccaaaatgaatgtgctctgagaatacgctggaactgagggtcagaaaatgtccagtttccatctcctgtcacagccccaaacactattattatttgcggagggccagtgatttgcttggcactgcacacacctcacaggagaaagctctatctctgcccagtggggttttaagaacagggcttgtaggacataaaagacaagtaagaactggcaagagagaggagcaatctaagcctgtggcttaaaatgccattaaaataatcattaaaaccaggtgcctaacgcaccccacagtctaggccaaaaacataggaaaatataagatttttcaccctttaaccacaggttctttgtgtaattggtaagcatcaagaaagggagtgacaaattcctccataggtattcagggagacagttgtattgttgtgagtgttgtcattatacattatgtgcccacagtctcatagtttatgctgggatacatacaagagcatgatgcatggtgtggacagttttagcagccaaagaggtattctccaggctgcctaggatatagcttgtaaagactaacaacaccttatctaagaaaagtgaagccccaagttgacaactcttgttgtgccatttaaggaccacagatgatttttttttttttttttttttttttttttttggacagagtctagctctgtcacccaggctggagagtgaagtggcatgatctgggctcactgtaacctccaccttccgggttcaagcgggcacctccctgccttagcttcctgagtagctgggattgcatgtgcctgccaccatgcccgactaatttttgtatttttagtagaggcagagttttgttatgttgctcaggctggtcttgaactcctgacttctggtgatcctcccgcctcagcatcccaaagtgctgggattacaggcctgagccaatggatgacttttgatcatccaaagaaaggcatccttcaattgccaatttcatgtcttagtgagtgcaggatgctatcacagaacaccatagcctgggtgtcttataagcaacagaaatttatttctcacagttctggagcctgaaagtctgagatcaaggtgccagcatggtcagcttctgctgagtgtcctcttccaagttgcagatggccatcttctcattgtatcatcacatagaggaaagaggacaagagggatctttggagtatctcttattggggcactaattccattcatgaaggctccacccctacaacctaattacctcccaaagaccctacctcctaataccatcacagtgaggggtaggatttcaacatgtgagttttatgggatgaaaacattcagttcataacattcctcaaataggaaaagcatgtcaagaatcctctgaagagatgccagcctgtgtggtaggccaaaaaaaattaaaaaaagctccccaaatatattcatgtcctaatccccagaacctgtgaatatattactttacatatcaaaggaagtatttgcaactgggcacaatgactcatgcctataatcccagcactttgggagacagagataggcagatcacctgaggccaggagttcgagaccaccttgaccaacatggtgaaaccccatctctactaaaaatacaaaaattagccaggtgtgggggcacacacctgtaatcccagctacttgggaggctgaggcaggtgaatcacttgaacccgggaggcagaggttgcagtgaactgagattgtgccactgcactccagcatgggctacagggtgagactttgtctcaaagaaaaaaaaagtctttgcagatgtgaagtcagggaccttgatatggagagattatccttgatcacaagggtccttataaaggaaaggcaggagggtgagagtcaaagcaggagatgtgaggatgtaagtagaggtcaaagtgatgtaagaaaacatgctgcaagccaaggaatgcagggggcttctggaaattggaaaagacaaagaattaaaatctcccctggaacctccagaagaaatacagtcctgctgacaccttgattttaggacgtatgacttccagaaatctaacataatagacttgagttgtttttaagtcattaaggttgtgataatttgttatggcaacagtagaaaactaatacctagtgaaattttaaaaaatcattctctcaaaatggtcttaacaatagacacatctaggatcctgccacatattctaaccctttcagaaagtatctggtaagtccaactgtggtggctcatgcatgtaatctcagcactttgggaggccaagatgggaggatcacttgagctcagaagtttgagaccagcctgggcaacatggggaaactctgtctctacaaaaatacaaaaattagctgagcctggtggttcatgcttgtagccccttctactcaggaggctgagctgggaggaccacttgagcccaggaggttgaggctgctgtgagccatgatagagccactgtactccagtctgggtaacagagtgagaccctgtctcaaacaaagaaaaagaaaaaaaaaaagaaagtatctggagatacttttgaagcaaataggtcttgtatattcccccaaagacagagcctacaggtataagatatgttaacagtatctctgtttaaaataccacctatggaacttctgaaaaagtagcattttttttccccaaagagctctgtactagttcagaactcccaggcaatgtatcacatatggctcaaaaactaatccttaaggtcatcctgaataattcttcccacttctgcttgtgattattaatcacaccgatccgtgagtactgttagagtaagtgcttctgcctttttccctacgactttaacagacaaggtctacatgtataaaatcaagatcgttttcctgaccttggatagctctaagtatgcctagagtttaagtttctgtactgttacaggtttgcttctgataccttcttcccagactactgaataacaagttggctttgttttttttgtttgtttgtttgttttttggttcggttttgcttctacagttagcatcctaggttctgacccccaagttgccatgcagataaaagctggcctggctactaaaatctcctcctacattccaggaattgttcttcagttccatgcaccaatgctaaggtaggcaaaataatttccatgccaacttgggctccaccctgctacctaggaaacaaagcagaaccaactttagctttccatgtcttacagagattttaacaatcctgcttttgttgttattgtctcactctctgttctgcagatatttaagatcagtcccagagggataagggatacctagagatcaatgtcaacggcatggagactgatcgactctgccgtattcaaaactctcctgatggagaaaatgggactagatttaattccttgttatgaactgaatgtttgttcccccaacctccacccctcacaaatttacatgttgaaatcctaacctccaatgtgatagtattagaaggtagagcctaggagaggtaactcagtaattaggttggagccctcatgaaagggaatagtgcccttataaaaagagagcccgtagaagtttcttaccttttttccaccacatgttgacacaatgagaaggcaagggtttgcaatcgagaagagggccttcactacgttggcaccctgatctcagcctttcagcccccagaaatgtgatgaataaatttctgttgtttataagacacccaggctatggtagtttgttatagcagcctgaactaagatatcttctgccttcaacagctagaaaactgaatacaatacacaaggaaacagtttttagacattgaaaaactggtagcacagtactgtgattcctgagagaggggacacaaaagaggtgagtctcatactttcttccagaactgactggaagtggtttatataccatagcagtatatacctatcactaggaccatcccaaacatagcatggtggtttcactgagttaggtaaagattgatgttcagccagactcaggtggctttaattttcagcgtagagtaccaaaaaagaaggaggttgctatgaatggaattgtgtcccctcaaaattcatatgttgaagccttaaccccaatttaatgttggaggtggagcatttgggaggtaaccagagttagaagaggtcatgaaggtgggtctccatgttgggactgatgtccttataagaaggggaaaacagagctctctctctttctctatcatgtagagacacagcaagaaggccacaactcaaggacagaaccctgaccagacaccaactctgccagcaccttgaccttggacttcccaaccttcagagctgtgagaaatttctgttgtttgagccacctagtttatggtattttgttatatagcccaagttgactaagacaaaggtgtgtagagcaagaactctcagaaatcataatgtggtccttttgaatctgttattaatataaaattgcacatgcatgtatgctatgaaactatgtaaggcagtgtaccagggaaataaaagttacataaagcagaatgccagggaaatatatgctaaacaattagcagagttcacacagggctggaaaatgccctagttactattcaccaaaatgcagagtcctcatggaatacctggacattagatggtgatcccaggaaagtcacaccttagtagtgactcagactttgccttagagtaaagagtactctaaacccatcatgacaaagcttaaaaacaagcttcaaatggaacaggctcgactaactactcaacattaacatcctttaaagacatacaacaaacatcagggcaaaagcaaacaaacaaacaaaaaacagtcataatgaccaggaagataatgttgtccataatcaagacaaaaatcagttaatagaaaatgactcatatagagaagatgaaaaaatggcattagcaggactttgaacagctattaaggaaacgataattacattccaaaacttaagagaaaattaagcagcaccttttcgaataacatatgaataaaataataaatcaaaaccaaagttataaaatatgcttcactgagaagaaattttaaaatacacatcaaaatttgtggaatagagctaaaagggcttagagaacaattcatagcattaaaattttatattagaaaagatctaaaatcaatgatctaaccctccactatgaaaaataacctagattaaagagaacacattaaatgtcacatacatagaaatgaaaaaatactaatgaaaaatgtgcaagtcaatgaaatagaaaatgaacaaataatagaaaaaataaataaaaccaaaattttattcttgttacagagcagtaaactggtagacttaaagctctagagagaaagaggagaagggaaaaggagaaaaaaagggtgggagatggggagaaagagagacagacagagagtaacagagagaataaacaaattatcaaattaccaacatcaggaataaaagtggggacatcactagagatgccacagagactaaaataataagggaatatttcaaacaacttcataataaatttgaccacttagataaaactaaaaaataccttgaaaatcataaattaagaaaactgactgatgaagagatagaaaatttgaatgattaatgccaatgaaagatactgaatttgtaagtaaaaatcttcttagaaagaaaattccagtcccagatggctttattggttttggccaatagtattttccaaatatagttgcattaatatcttttatcacacatgctcttttgaagccttgtcacactccataaagaaacgtaatatgattcttttttttttgtatctgagtgattgtaggacttgcttttaattaatagaatgtagtagaattacactgcttaacttccaactctagttataaaaggtgattccaatatataacaatgagaagatatgggaaagctacccatatatcttttggttgagagccagcatcaaccaccagacatgtgagttgagtctggtcctcagatatcaagtgactttagcctttgaatctagcgacctgaggcacacaaagtagaagagcaaagataagccatctctgctgtggtctgtctgaatgcctgactcagactctatgtgcactaaaaaaaggttgtttgaaactcatcaattttaaagtggttggttatgcagcaatagaactgaaacacaattctgtaaaatatttaaggaatatttagatttattacagaaaagtaagtttgctgtaacattcaaaagatcaaattcatcatatttacagaataaaaaagaaacaccatacgatcatcaaaaatgcaggaaattaagttgacaaagtttgatagctattcattatttatgttttcagaaattaggaatagaaggaattttccctagtcacgtaggggttttgatgaaaaaacaagctaacataatactaacattacatttaacagtaaaagaagtgatgatttccttctgagactaggaacaagacaatagtatctactgttttcatttctattcaacattgtgctacagatccttgtcaattcaataacaaaataataataagtaaaaggcatacatattggaacaaaaaaagttagacttccttatttgcaagatgatatgattacctatctaaaaattccaaacaacctacaaaataacaaaaaaggcactaagtaagtttgtcaaatgtatgcaaatataaattgttttttatatgccaccaatgaagcattagaaattaaaattttaaaaatactattacaattgcaattaaatgtttaagtataaatttaacaacacgtgagcatgagctgtacactaaaaactgcagaacattgcataaactacaaaacaatgctgatgcctaaataaaatggagagttataacatgttcatggattaaaagactcaatattgttaagatttctataattttacttataaaattaatgcaatcccaaccaagttaacagcctatattttaaatataaccaagtctacatttttttaaaaattgacaagctaagttgaaaatatatatggatatgcaaataacctacaatagcagggaaaaaaaattacaaagagaataatatctgattttattacttattcttaagtgtgctgttatcataaaaatagaaatatatattagtggaacagaatggcaagtgtattagtcagttctcacactgctataaagacatatctgagactgggtaatttataaaggaaagaggtgaattgactcacagttccacatggcaggggaggcctcagagaacttacaatcatggtggaaagggaggaggcacattttacatggcggcaggcaaaagagagcaaatgaatgaagggggaagagccccttataaaaccatcagctcttgtgagaactcactcaatgtcacgagaacagcatggggaaaactacccccataatccaatcacctcccattaggtcccacccttgacacatggggattaggggaattaaaatttgagatgagatttgggtggggacacagtgccaaaccatatcagggagtcagaaatatacccacacatatatgtggctatgtatatatgttaactttgacaaagctaccaagacaatccaacagagaaatggatagtcttttgcacaatgatatggggataagtatttatacatacagaacagtgagccttgactcttcccttccactatataaaatattaacttgaaatgcaacatagatgtaaacttccaaaagaaaatataaaactttcaaaagaaaacaagagaaatctttacaaacttggaataggttaagatttcttaggtaagtcacaaagaatacaactaataaaagagaaatgggcaacttagacttcatcataaaaagagagaaaacattcgccctttggaaggaagatactgataagagaatgaaatagcaaacagactggaagaaaatattcgcaataaatatatctggtataggaattatttctagaatatgaagaacacttgaaaaatcagtaatagatcaaataaccctacataaaaatgttttgttccaacacttcacaaaagaagatgtataaataaccataaggacattaaaataaactcagcatctttattcatcaaggtaatgcaaattaggactacaaatagatatcattataaccccactataatggctaaaattaaaaagcttctctgtcccaagagtcagcaagtatgtaggacaattgttccacactgctggtaagaatgtgaaatattacaactagtcaggaaaacagcttgtcagttactctaacaagataatcatacactgaccatcagccatggtactcctagatatttgaccaaaataaatgcaaacacatatctacaaaaagagtagtacatgaatgtttgtgaatgttcatagcacctttatttgccatagcccaaatgagagaaaacccaaatgtccatccacaggtgactggataaataaatgtggcatatccatgaaatgaaattacgataagcaatgaaaagaatatactacttttatgcaacaacatggatgaatcacaacaacactggctttacacaagagagtataaactctaagattataattacatgaaactgcaaaaaattcaaatctaatcagtggttgcctgtggtcagaggttgaagaattgaaattgactacaaaggggcacaattttggggctgataaatgttctatatttaggttgtggaggtgattacacagagttatattttcaaaatttctcaaagtatatgctcaaaatgggtgcagtttatgtaacttatacatatttaacttatgccccagttgataatttcttatcttctcccaataccaaaatacatacccatccacaaactctgcctacaccacccctatccatatgctgtgtctgtggactcttttcttgggtgagttccttcccaagtggtgcctaaacaatttaagcaaataggaccctgggtactgaggtactttgtaagccctgtctgtatgtttggccatatgagtttagatattattcaattttactccctctggaatttgcagctattcaaatctacacagtaatgaatgactaaaagctagtggcaaaagacaagtatttaaagaatgacagaaacaggaagaaatgcgtatctggggaaagtcattaactgtctttcctgtgatgagtgacttccagagggcaagaacaaatatgttctacatcaaagtatccctgtatacttttgaaggaagttatttctgtctgctcaaagattttatgaaatgctatacttggtgataagttaccactcttccaccccctcactggcatagaattacaacacaagagaataacaattaaatattatttgagctgtggtttagaatgcatatatttaggactttaacagaaatgacattgggtggcatttgctgaagagcggtatgacatgaaaatcaaatccttgagaaaataaatgaccactctaccagaatgcttaaggtcaagtctatggagaacattgtaccatcttacaactattttgatcttcagtatttttcttttttgagaaacatttctctgatttccttttatttagacttgtagttgaagcagcaggcaaaaatagcaggcccataaaagatcttttctccattgatgtatatacgtttcttgatcatttctataaactcagaaagtcacatggatattccaaaaatggtgtcatatgaaaaagtcatttccatcatagtttgtgatatttttctgtatgtgcagttcatgtattatattcactatggtgtcatttcatagaatgaggctctctgggtagcaggagaaaacgctaggcaaatagggaaaacatctgagattaaaagttttccaggaaatatgtcataaggcaacactaagtatatgaatcattgaaagagaactatctggagatctctggggacaaaaacttctaagaatcataaaaatgtgttatcatgattcctgctggtaacttgagccaacttcaaagctttctttcggggattatgccaagagtacccattatcagaaaggagtaattagagtgaattattattatgtccaacctgccttagatggagtacagctgctgagtcacactataaaaatgaaattggagcattcacctgcttatgtagtttgtttgaattgtatatctggttttcaaagcctgaacagtgacaccagaaaaataaaaagtcatcacagagtttagcagacatcagatttgaatgccctcttcttatgtattgcaacaaggcaatataattttctggacatttttaacactttaaagattaattagttttcatggggtgttatttaaacatagaaattttattctatcataaaaataaccattgttcccagatgtgtctgtttaactgtatttatagtgcttgcagttgcagttcctggagcctcactatctgctgcaactgcttcataaaggaaaatttagacagaaggtcacaatataataaaatcctttctcattcacttctgcaatgaacttgaaaggaacaggtgcatggtctgggaggaagactgattgatgattgattatccaaaagattgcttcttttttttttcttatttttcttcttttcctttcccactcagtaggttccccaaaatatcatgagaaagcagtttaatacaaacagatacatcttactctagttaaaaaaacaattatgaagaagtagaatgacatagacaactgataaaagaagatgtaactcattttttccctcatttttgatgcatacacatctgggaatttcatacacaaagttaaggaagtaaacagatgtctgctgttgatcgccatctctggtgaactttcagagcccagcagtaatttgccccgtggctctctccttatcagaagggcattataaactctcacctgggagtgagcaccgcagcctgcccaagcaacattcatctggcatcaatcctggtcataaaacaagcccatgagtaatataacagcccaggtgtctacaatttccgacttccaaaccatctgaaagcatgcaacaactttcaaatcacggtttccctatctctatttaaggacagtgaagagaactctaagaattgtaacctagtcccagacatactttggttgagtgtaacactcttgctcatttcccatcaagacagcaaatactgtgagtgatcaaaaaggaatgacatactccaggagtgtaaaagcaactggaccaatatcagcaatgcaggttgcataaccagcaaatgcctgatcttgaaaagattgtcttgacttgccaatgtgttcttcattcaacagctaggagagtatgttggtggtacccagaccaagaagcctcgaacatctgaagtggtttacactgctaaagacaagacagcagttgtgatcaaaaacatttctagctgaatatatatttttgtcctgggtttgaagacacaaaaataatgtatagaccctaaagtttatacttattttaaaaattagggaaagagaactagatagaggtgatggttgcaaaatgttgcgaatgtactaaatgccactcaattgtacactttaaaatgattaattttatgttgtgtgaattccatcttaataaaaaagaattttaaatggtgagaaaacatttacataaggaattaaggccaaaacactctgggaacaattcctaaataattctttcattccacaaactttttttgcacacttataagcaaagtaaatactaagtaaagcaatactaaggtatgggacttagaaaattaagacactataaagcaaagtaaatactaagtaaagcaatactaaggaatgggacttagaaaattaagacccttatattctcatccttcaaaatccccagaggatttaaagccaggatacctagtcttttgttgttgttgtttttgttgttattctaataaagacttctgggaaagaaaatcttttctcggtcttatcaagctaaggttctagggttagacagcctggcttccatctgtgcaagtctaagcatgctggttaacctcaacaagtctcacttttcccatgaaaaaaggaagacaataaagagatcaaacctcagaaggatgttttgaggatttagataacacaggtaaagcatgtagtataatactagcattaaattgatattaagcttgattgttgacattattatgtagctttatcatttatgtcaatataatgtttaaaattgtttttgcttcctttatttttcagcacatttccatgattgtacagtatatcttaatgataatgaaatcagcagctctgaatcaaattaatttttaaaagattctaaacgtggtgtatcttactggtatagtaaccatgatactggtataggaccgtgataccatagattcaactaactagttaagagctcaataatcagttaattcttttcttttccttcaagtctccccattcctaactgttgcaaaaaaaaaaaaaaaaaaaaaaaaaaaaaccaaaacagaggaaactctgttacctcctaagataggcttgctgtcttgtaaaatagcattcaagctagtgaaagttttgggggagaataagagtgaaataaatacatctacttctacttgcagtttattctttttctttttttgtgaaaaattaactttattattttattgaggaataatttacgtgtaacaaaacgtcccattttaaatgtacagttggtgagttgcaacaaatatatactcatatataaccaccactacaatcaagatagcaaacatttctatcaccccccaagattacccttgtgcctctttgcaatcaaccccaccccgtcctttgcgtcaggcaactatttatctgctttatgacatttacgttagtacagtgtcatctacaacacagcatttgcaaattatgacccacaagtttttttagtaaaggtctaaagataaaaatattttttacatgtttaaatgatttttcaagaagaatattttatgatagataaaatgcttatgaaattaaaatctccgtgttcacaaataaggtttgattgttacagtcacactccttccttatatattgattgtggctgtttttgagctgcagtgacagagttaagcggttgaaacaaagacaatatggcctgaaaagctgaaaatacttactattcggtcttcttacagaaaattgaattaaacagtgtacgatcttttcaatctggcttcttcgctcactgtaagcttttgaaattcatctatactgttgcatgtaatagcaagtgggcctttttaccgctgagtagtattccattaaatataccacaatttgtttccttactgccatactcacatacatatgagttgtttccagtttggggctgtcataaatgacgctgtgttaaaattcttacacaagtcattttgtgttcatatgttttcatttctcttggtgaagtagctaggagtagacttgttgagtcacatactaagggtatgctaatgtgataagaaacaactgtgaattagacttgcagttgctccatgcctttgccattccaaagactggcaagaatttgaaatttgtattcttagggattaaaatgccaagtatctttaagcaaaaaacacacaatctaacttgagtatttatattgctctatttttgttaacatgtctttcttaaaaataaattctactgtgtatatttaaggtgtgccacatgatgttatgggatacatagagatagtaaagaggttactacagtgaagaaatgagcatccatcactgttaattacactcatgtttctacctctcttacctcttgttttcagaaaataatattgtctttggatttctacttaatactctatgccttttatagaagactaaaatatatcttatttttaaattctggtgatgataaagcagaactggatcacacacatttttttgtaaggggccagatagtttaggctttgctggccacatatggttgctgtttaatattctccttcctcctctttttctttcttttacaaacctttaaaaatgtgaaaaatactcttagctgatagactgtacaaaaacaggctatgtgccagattcagccaatgggttgtagtctaccattgaaacagaatactatttttttataatgtaacgatgctcagagttttacctattgtttctttaaaaatactgaacatgaatcaatctgacatcataataaatagctttcaaagaaagtaatctgagatctggaaaactctctcttaagtggatgacagaaagccagcattatctcagaacaagctcctacagctgattattacatattcaagaattttgctatctgattattaaaccactgacagcttgaaatggaccacattttgagtatttacaccagaaaaaatcagcaaatactattttttttttttgagacaaggtctcactctgtcactcaggctggagtgcagtggtgccatcatggctcactgcagtcttgacctcctaggctcaggtgatcctcccacctcagcctcccaagtagctgggattacaggcacacaccacaacacctggctaatttttgtatttttttgtagagatggggtttcaccatgctgcccagactggtcttgaactcctgggcccaagtgatccacctgccttggccttccaaagtactggcattacaggtgtgaaccaccatgcccagcagcaaatactttttattttattttagagatcagatctatcatcatgccattggcaacacccttgtgaatactagtgctttgctgtctgtatgcacagcctgatggtacccagactagcagaaagttaatccattaatcacactccccagatactgtgggggacaacccatccttgtttcccatcataatgtggaacatttatatttttctctcacctgtaatctaactggaaattgagaaattctaaccataaatttaaaaatgcagtttctataacattcactgagaaggcacaagaaaataggaaatgcttctatatctgaattgctgtatatttctggttttattttttctgttcatgtgcaaatgcatgttctaatttttccttgtatataattaaaataataaagtttctcataaatttagtttaatattttgcactatgtttataaaaatttcagatgacagcttctttctgattttgacttctgtaaattgagttggatcattgtatagatcaagggtcacctgcaggacaaatctgatcactgcccagccatgagctaatgtttttacatattaaagcattatttaaaaaagaaaaaaaaaggaagtggagacagagaagaagatgcaacaacaaccatatactctacaaagactaaaattttaactatttggcccgtacaggaagtttgccaatcctttgtatagataatcaacacagcattaatattacataatttacttaatattttgctcactatgattctattagtctgttttcacaatgctataaagaactacctgagcctgggtaatttatgaagaaaagaggtttaattgacacacaattccacaggctatacaggaagcatggctgggaggcctcaggaaacttacaatcatggcagaaggtgaagggaaaagcgggcacatcttaccatggcagagtaggagagagagagagagcaaaggggaaaatgctacacacttttaaacaaccagatctcatgagaactttatcatgaagcagcagtagggagatgctgctaaaccattagaaaccacccccataatccaatcacctcccaccaggcttcaacttcaacactcagaatcacacttcaacatgagatttgggtggggacacagagccaaaccatatcaatggtatacaagatagggaacaaattatcttcctatttgttctcttttaaaaatgacaaagaaataagaatataggaaaaggagcaacggatttactggaaatttccttgttttcctctctttgggacttttttctcaccctccccatttttgtaggtaagaacattaatttaaaaacaggaaagaatgagtgaagcagggagtaataaactctccgtgtctatcacttcactttccaccaagccagcattcctcaaatattcatgagtactcaacttttaaaacaggatatgtaaataaattgtactcacaacttgtgacaggctaggtaccacaaaattgaaatatagttatctacgtagaaatcctgtgcttctggtgtttacatgttccattcaagatactttattgagaacctgctgtacccaaggaactatattatgggtcaccggtctgaaagcagtctagatacatacttagctataataaaaaattaagcgtacagtcacactgtgtgtaaacaattcattttattcaggcattcctccaaatgtcaatgtcttctcatatttagcactctaccagtttgcatgaaaatctgcatttacaaaggaaatatttgactaggctgttgacagaaagaacctaagacagaagagcttctttaatttttctcttttttctcagcctttccaagagagcaaacaccagctctattcaggttaggcagctgttgatggacatctgagtattggtaataggaacttcctgggctgatcataaaactcagggtcttggttttgccctgggttacaagcagaccaaatcgaatgtatgcaacttgtacagtatttgaaatatagagaatgagaaggagatggcagtgggaagagcaaggaaaaggcaaagaccaaagaaacacaacacaaagctctggaggcagaagggctgggattgtggtagagaaacttaccagatcatgtgagggtttgcaggccacgtaaagagcagtttgaaagcagcagagtgtgcttagaagaaacaacaagatttgattctacttttaaaagttcacacttggggctgttagatggtaaatgaatggtcatcaggaggagaagaattaaaaagaccagttgacaggttatttcagatagttcaggtagcaaataatattggcaatggagaaggagcaaggaaacataatcataatgtatttttgagttactaatgtcaggatttttgcaatgggctagtgatgttctattttactatggaattaaatgagagttcaataacagcttacacgagaaattctagtgctccatgtcattctcctaatctacattgtatattctttcatgaaaagataatcactttgcttttatgcaaagatattaaataataactgttgtagactgaatgtctgtatccctccaaaactcataaattggcatttaatccccaatgtgatggtatttgaaggtaggatctttgggaggtaattatgtaataagagtggaattcatacccttgtaagaagaggccagaaagtcagcacattctcttttcatcaagtgcatacaaccagaagtcaacaatctggaacctggaagacagcccttgccagaatcaaaccatgctgttcatacaaccctcatctcagacatccagcctccagaacagtaagaaataaatttctgttgtgtataagccattcagtctctggtattttattaaagcagccaaattgactaatacagtcactcatacttcttctacataaagttggtactcaattgatgcttttgtagagtagagatgtggtggtcatgggcatgaaatgaccagatattacttccaggaagactctgctataaggagagtctgtggacagtctccatctgccacatctttgggatctaccacaacattcacctcaagacctttctttccctgagctgctcttagtcaatgacgaagcatagaacaggttctagagcaagactatttcggcccaatgtgcaacatttgtaatggacaacctttgtgttgggactgcccatcagcctggctggccaagcctttctcagagctatgttgtagcctgaggctcttcctactcaaatctccttccttttctctctccttccacaagcataagaactgcatcacttctgaaggttcttccctcctattcctgttctctctcctctttatcctttacaggcatttcccccagtatatcccttgcacatctagttctatcatgacaactgcttcctagaagacttgaactaatgctagaggtaattataaatattaacattagtactctgcaattttgtgctactatttcttggaaacaaatcaataaaatgacaataaaggaaattttttaatgaccaaaacacacacacaccagaaaaaaaaaaaaaaaaaaaaaaacagatgaaaagatcagagttcagacttttaagctagaaggcagatgattgtgaatgagtggtcactggtcatggatttggcataccagagagcgctgaatcctaaaatgacaaagcaagaggtcaaaacggcattttatgtaccatacaatgttttcaaaaatttagaagttggcagcatcagttacttctggtattaaaagtaaaggtggggaaaaaagattagttgaaaatctaagacaaaagtagaactcccctgaccccactgcaggatcaccttggtgaggggtagtgacatctgtatgtgcagccaagcaagcttccatcccccatcccagcaaaagactagagatttatgttctaaaaagagcaaagcataaaggactccacactgagaaataaggcccattgatgaagaggtacttcccaacatttttcacccacttagattctagaactgtggaagccaggagttcgccatccatatagaaaatagaaagtctctcttctaggaaacctgactacaccaagaattaagatttaaaatactgtatttgggcttgcacaaggatatgacttacaggaagatcacagtaaacaagtcccagacattggaagggaaaaaaatgtggtattgaaaacagagacaaaatatgcaagtaaaaaaaaaaaaaaaaaaagcaagtgaataaaaactaagcaagtagacaggtgactaaatgaagagaatttattattttcaaagagataagaagtgtatttatgcaaagaagaagtgaatgctagaggaaaggtatctttgttgaattaaaaaaatgctttttgaaattaaaaatacaagagcagaaatttttgaaaaattcaatataaagtgtgaaggataaagttgaggagatcagaaacagaaaacaaataaaatagtaggaatcatagaaaggaaataatcacatgaaaatttcaaaacaacatccccccccaaaaaaaagataggttttatagttttaaaatgtccagagagtccacaggacaatggatgaaagtggatctattccaagacacaacattgtaaaatgtctactcttgcaactaagatcccataattttgtagaaaaatggattttataataaggttctgaaatctatgattatattttctttcaatagtacctgtagataccaaaatactgtagagaaatatcttcaacattgttagaaaaaagtatttccaaagtaaaaattatacatcctgctaaattcccaattcatcgtgaaagcagagtcaagacatctttagatgtataaggtgtcaaaactttactcctccatacctactatcacagcatccatgcagaaaaaataagacatgaattctgggaaataggaaaccagcttggaaagatgaaggaaatcaagatgatggttaagagaaatcccagggcagcagctgtgcagctaatatagagagcaatccaccttgactagagtatgttagaaagtttcagaagaccaggtcagaaggcaacaatgatagattatcgaacatctataatcttactgagaaacagacagagctgaagcaaagattcagcttgaattaataatcagtacaaagaaatcaaaaaaggaataaggcaattatcatcaacaaaaacttttaaaggaaaaatgattataatatactatatgactcagctgtgactaaggttttcatagttataatatcatacagaaatgaatgttgatgtaataacaattaccaaattactcccttctaaagaagagttgataagattcctgtagacaaggagtaaggaaaagatagccaactctccatcttctataatagtagtttaagaaataatttttaaagcaaagtttttttaaatagtgatattatcaaacattaattagagatatgtacataaatgttgaaagaatctgctgaaaaagttaggaaggattgccttggggagcagaacagctgtcttctgcaacaagacaaaagtacaggcagaaaatcaacaaccccccccaacacacacaatattattttcttaataataatatcatcatccctataatttaattgtccaatcaagtttgccaaagaaacccagctctaggacaatcttgctatactatcattagactagaaaccccagtaatcttgattttagttgactaactttgaatgtcatgactcattccaaagaaatattctacacagataaaactaacgtaaaattaaaagaagcatcaatgaagattcagatttcaaccataggcttccaattaagggaagaagggacaaggggaggatgagaggaagtcagtttggtcactctaacttctggtaggtaattgcttattttcctgaagattttaatctatgccaagtaatatatattatatacatattatatatattttatttatatatatattatatataatatatataatatataatatatattatatataatatataataagtatattatataatatataatatgtatattatatataatatatattatataatatatattatatattatataatatatattatataatatataattatatatattatatattatatattatataatatataattatatatattatataatatataatatataatatataattatatatatttatataattatatattatatatataatatatatctcaacagcatcaacaaaaaagaccccacgaaaaccccatccaaaggtcagcagcctcaaagatcaaagctaaataaactcatgaagattagaaagaatcaatgaaaaaacactgaaaactcaaaaagccagatgcttcttctcctccaaatgatcacaacacttctccaacaagggcatagagttgggcagaggctgagacggatgaattgacaaaagtgggctttgaaggtgggtaataacaaactttgctgagctaaaagagcatgttctaacctaatgcaaagaacctaagaatctggatcttcactgatgcttcttttaattttacattagttttatctgtgcagaatatttctttggaatgagtcatgacattcaaagttaatcaactaaaatcaagattactggggtttctagtctaatgatagtgtagcattacaggagctgtcaaccagaataaacagtttagagaggaatagaaatgccctgatgcagctgaaaaacacaagaacttcacaatgcaaccatgagtatcaataactgaatagatcaagcagaggagagaatttcagagcttgaagactatcttgctgaaataagacaggcagataagattatagaaaagaagaataaaaaggacaaacaaaacctctgaaaactatgggattatgtaaaaagatcaaacccacaactgattgaggtacctgaaagacacatggagaacggaaccaagttagaagacatacctcaagatatcatccaggagaacttccccaacccaacaagagaggccaacattcaaattcaggaaatccagagaatgctagtaaggtactccatgagaagatcaaccccaagacataaaatcattagattctccaaggtcaaaatgaaggaaaaaaaatgttaaggacagccagagagaaagaccaggtcacccactaacggaagaccatcctactaacaagcaaacctctcagtgcaaaccctataagccagaagagattggggaccaatatttaatattcttaaagaaaacaatgtccaacctagaatttgatatctggccaaacctagcatcataagcaaaggagaaataaaatccttctcagacaagcaaatgctgaggaaatttgtcaccaccaggcctgccttgcaagagctcctgaaggaagctctaaatatgaaaaggaaaaactgtcatcagccaccacaaaaacacactgaagtacaaagaccaatgacactatgaagctactacgtcaacaagcctgtgaaataactaactagcatcatgatgacaggatcaaattcacacataacaatactaaccttaaatataaataggctaaatgcccccaattaaaagacacagaatggcaaactggatagagtcaagacccatcagtgtgctgtattcaagagacccatctcatgtgcaaagacacatgtaggctcaaaatataatgatgaagtaaaatttaccaggcaaatggaaagcagaaaaaagtaggggttgcaatcctagtttctgacaaaacagactttaaccaacaaatatcaacaagagaaagaagggcattacttaacagtaaagggatcaattcaacaagaggagctaactatcctaaatatatgtgcacccaatacaggagctcctaggttcataaaacaagttcttagagacctacaaagagacttagactcccatacaataatagcacgagacattaatactccatagtcaatattagacagataattgagacagaaaattaacaaggatattcaggacttgaactcagctctgaatcaagtgtacctgataggtatttacagaactcttcacccaaaaacagaatatacactctttttggtgtcatatggcacttactctaaaagtgatcacataattggaagtaaaacactcctcagcaaatgcaaaagaactgaaatcaataacagtctctcagaccacagcacaatcaaagttgaactcaagattaagaaacttgctcaaaaccatacaactacatggaaattgaacaatctgcttctgaatgactcttgggtaaataataaaattaaggcaaaaatctagaagttatttgaaaccaatgagaacaaagagacagcatacgagaatctctgggacacagctggagtagtgttaagagggaaatttatagcactaaatgcccacatagaaaaactagaaaggtcttaaattgacacactaaagtcacaactattaataaaataactagagaaccaagagcaaagaaaccccaaagctagcagaagacaagaaataaccaagatcagagcaggactgaaggagacagagacacaaaaacacttcaaaaaatcaatgaatccaggaggagtttttttggaaaaattaataaaatcaatagaccactagctagactaatgacgaaaagatagaagaatcaaatagacacaataaaaaatgataaaggggatattaccactgaccccacagaaatacagacaaccatcagagaatgctataaacacatcaatgcacataaactagaaaatctagaagaaatagataaattcctggacacatacaccctcccaagactaaaccaggaagaagctgaatccctgagtagaccattaacaagttctgaaatggaggccgtaataagtagcagtctgtcaaccaaaaaagcccacaaccagacagatttgcagcagaattctaccagagatacaaagaggagctgttatcatttcttctgaactaatccaattgaaaaggagggacatatctctaactcattttataaggccagcattatcatgatagcaaaatctggcagagatacaacaaaaaagaaaacttcaggccaatattcctgatgaacatcaatgcaaaaaattcgcaataaaatactggcaaactgaatccagcagcacatgaaaactcttacccaccatgatcaagttggcttcatccccaggatataaggctggttcgacatccacaaatcaataaatataattcatcacataaacagaactaaagacaaaaaccacatgattatctcaatagacaaagaaaaggcctttgataaaattctacatcccttcatgttaaaaactcaataaactggatattaatggaaaatacctcaaaataataaaagccatttatgacaaacccatagccaatatcagactgaatggacaaaggctggaaatattccccttgaaaatcagcacgagacaaggatgccctctctcaccacttcacttcaacatagtattggaagttctggctagggcaatcagacaagagaaagaaagaaagcgtatttgaataggaagggaggaagtcaaactgtctgtttgcagatgacatgatcctatatctagaaaaccgtattgtctcagcccaaaagcttcttaagctgataagcaactgcagcaaagtctcaggatacaaagtcattgtgcaaatatcacaagcattcctgtacaacaacaatagacaagcagagagccaaatcatgaatgaactcttattcataattgctataaatagaataaaacacctaggaatacagctaacaagggaagtgaagaacctcttcaaggagaactacaaaccactgctctaggaaattagagaaaatacaaacaaatggaaaaacattccatgctcatggataggaagaatcaatattgtgaaaatggccatagtgtccaaaataatttatagattcaatgctattcccattaaatgaccattgacagtcttcatataattagaaaaaactactttaaaattcatatgcaaccaaaaaagagcccttatatccaagaccatcctaagcaaaaagaacaaagctggaagcatcatgctagttgacttcaaactatactacaagtctacagtaaccaaaacagcatggtactggtacaaaaacaaacatatagaccaatggaacagaatagagacctcagaaataagaccacacatctacaaccatctgacctttgacaaacctgacaaacacaagtaatggggaaaggattccctatttaataaatggtactgggagaactggctagccatatgcagaaaactgaaactgggctccttccttacactttatacaaaaattaactcgagatagattagagacttatatgtgaaacacaaaacaaccaaaaccctataataaaatctaggcaataccattcaggacataagcatgggcaaagacttcatgaataaaacaccaaaagcaattccaacaaaagcaaaaattgacaaatgggatctaattaaactaaagaacttctgcacagcaaaataaactatcatcagaataaacagacaacctacagaacgggagaaaatttttgcaatctaaccatctgacaaaggtctaatatccagaatctacaaggaatttaaacaaatttacaagaaaaaaaaatagccccattaaaaagtgggcaaaggacatgaacagatacttctcaaaagaagacatttatacagccaacaaacatgtgaaaaaaactcaacgtcactgattattagagaaatgcaaatcaaaaccccaatgagataccatttcacaccagtcagaaaggagattattaaaaagtcaagaaacaacagatgctggcgaggatgtggagaaatagaaatgcttttacactgttggtggtaatgtaaattagttcaaccattgtggaagacaatgtgccaattcctaaagacctagagccagaaataccatttgacccagcaatcccattactgcgtatatacccaaaggaatacaaatcattctcttttaaagatacatgcacttgtatgttaattgcagcactattcacactagcaaagacatggaatcaacccaaatgtccattaatgatagatgggataaagaaaatgtggtacatatatgtcatggaatactatgcagccataaacaggaacaagatcatgtcctttgtagggacatggatgaagctggaagccattatcctcagcaaactaacaccagaacagaaaatcaaacactgcatattctcacttataagtcggagctgaacaatgagaacacacagacacacggaggggaataacacacactggggcttcttgcgcgcaagtgaagggagggagagcaccaggataaatagctaatgcatgctgggcttaatacctaggtgatgggtttataggtgcagcaaaccactatggcacatgttttacctatgtaacaaatctgcgcatcctccacatgtatccccgaacttaaattaaattaaatttgaaaaatgctcaatgagataaagcatatataaaatatatacatatttcatgacaaaaatcagaaaatggtatctaaaatgtagacgaaagatccaataatgctaacataaataaggaagtaattcccaaggcaagcctgcaaaatgaagtgcacactgggacccaggaactgggtggcactgggaaactgttccttctccaatagaatagaaccgtgctccatggaagatatgacatcagccttttgttatgacatcagcctctggtttctgaagaggaagatgagtggagtatgcagcctagtaattattttgctgtgaattttcagtgaagatgctcttatcctaagtattccactgattaatacagtgaggtttggggttgaaaataataatgaagaaaaagctcagtttattctcatttggcaaatttaccaatgaaacaaaatatcaggcggggtgcagtggctcaagcctatcacctcagcagtttggcaggccaaagcagatggactgcttgaagtcagaagtttgagaccagcctggccaacatggcagaaccccatctcttttaaaaatacaaaaatgtacctggatgtggtggcacatgcctgtaatcccagctactcaggaggctgagactggagaatcacttgaacctgggaagcggagtttgcagtgagccgagatcaagccactgtactccagcctggatgaaagagtgagactgtctcgaaaaaaaaaaaaaaaatctattaagtatgcatcatttctgttttctaatgcaatctctatgtttatgaacaaaaagcaaattgaactcttcattataactccttctccaaaaaaatctctggacacaagtgcttcaaatcagcaacctttccctgcattacccttaccctaattaatgaccataacgacacaaggactgggactcttgccaattattagcttcatctctgtgttctgtttctcaacataaattcaataaacaactcaagacttgctggagtttgaaagcaaaaaccaaagccaaagccctgtgtatattaaaaccattcctgcaacaataaactctgactgggaaatgaactaatcattcctgttgttcaactaagctcccaactgaagaggctgaaatcacagccccctcaaagaggaagctctggcttaaacaacaaggaaaaagcattgactgaccttcaggtaccctttgtttccaggcttctctgacataccctctttttctgcaccacatgcctctcattcctccaagccagcatttgatagttgagcttaagatggtgaatggtgatgggtgactcataacccaccatttatattccattaggggaaaataagcaagatagagtgtctggtaacatgctcttagacaaatagttttcaatgttttcccttagcgacattttttaaaggcaccaacaagaagaaagtgagagttctgtttagcaattgatgaatctatctgtggctaaaaccactatgtaattggaaatctttgcaacatgagaaagtctgtgcccaaaactctattgtatcatttttcatatttcttatatgacaatgatctgatgacttctgtgcccctaaactcttcctttaaccatctggttctcgagtttagtacaagcctgcttagatgcaatggaaaacttggaaaggataacaacacattcattcaacaactcatttgtagaacttagaatttattatgattcttactaagtgacaggcagcctgagaagagggttgtacatcaatcaatgcaatgatatgtgatgaatgacagatgaaaagatagaacaaagatacaggacacatcctaccaaactgaaacaggagtggctggtgtgcgatgcacatataacagagtattagttgtttctacacacaagttctatgcatgaaagggttacctgcaagagcatggtaactcaggctaacttcacactggacacttaacttcacagaggatcagtgttttagcctcatttatctgtgactcagtcacagacaatgaataagaaggttaacctgaaaactttttccaaagaaaattgatgtcctaatctaccagtaatacctgaatatatctatttctttctgcttttcagaaatacctttgttctctgataatagcataagaaatgtccacaccctcagttgcctaggaattcaataaatgaacaccaagtaattagtgttgtgtagacctttatttaaagagatagcattttggtgtgttgaaatttgtgtgacaaaaagtttggcacacacaatagccatttttagttttttcattcatgctgaaatagtttgcctcccacgagagagaaagcagatacagatgctcatttttccagcttcccttgaggccaggagtaggaatgcaaccaattagacctaaggagaaatctgctctgggacctttgaggtagaattagagaaagcatgagactaactctcttctccacattccttcttccagaatttgggtgttgagtaaggacatgatacttagagttgcagcatgaggtggggagaatgtcaaccctaaggataacaaaaaaaaaaaaaatggaaagagtttgattttcttatgccattattaacctgatgaacctatcccggaactgtcacaactctaatctttgtatatgagatatgaatggcctccagttgtttaagccacgtttggtatggaagtctctaacttgcatttcaaagcaagtgattggtttggaaatagggaggcataagccaatttgaaccaatgcaacacagaagaggctttctctaagctcttggataaaacagtttaccaaatatgaacactgaagtgtattttttcaattattgctgatagccatttgagaccttgaaatgagccagtgcaaggttgagccaatagcggaatagctgagaggaaacttggaaagtgtctacgttcttgatgacattgttgagtcatttagtcaaacaactctgtagtccacacttcatcttggcttcctagcatgtgagataattaatccatgtagggtttaagcaaattttatattgtttactatggcaggttgattgcattgatggtcccaattaatgatgtttctggatccaagctctttgccttgcagctttgtaggatctgcccactctaactacaaaaattgctttatccaatagaacgtgacaaaactaatggtgtgctggttctgagcctagaccacaagagaccttgagtgtctctgttctattggaatcctgccactgtcatgactaccagcccgggccagcctgtagataatgaaagaccgcatggaagagagccgagctgtctcagctgaggccatcctagactcgtctacagttagccgacacccaaacacgagagacagccaagccaaaatcagcagagctgccgacccaaccaacagctgaccacagacatatatgtgagtccagccaagaccagaagatttgcccagacgacccatggactcataagcaataatcaatgttaaataataaattgttttaagccacactgagtgttgggacgctgtgttatgcatttagttacttttattacttgtaaatgagagcattctagctgataaagcaaagtagaaagctgaagagatgggcagaaggcttcccttataatatactctaagcacatgggacatgcttgaaaggttttaattagggaaatgatcaaatttgcattttaaaaacactatggcttggatgtggaggataatattaagatcaggtaactaaacttgcattaaaaacaacagcccagcgtcaggcacagtggctcatgcctataatcctagcactttgaacgtctgaggcaggtggatcacttgaggccaggagttcaaggccaacctggacaatatggcgaaaccccatatctaccaaaaatacaaaaaattagccagatgtggtggcatgtgcctgtggtcccaactacttgagaggctgagataggagaatccctcaaacccaggaggtggaggttgcagtgagccatgatcatgccactgcactccagcctgggcaacagagtaaaaccctgtctcattctaaaataaaaaataaaaaataacaacaacggaccaggaaggaaggaaaatttaagatataagacaacatcatttaaaaaacaaagttatctgagggggaaaaaaagaagagagataaagcacatagggtagaagttgtagatttcttgagttcctacaatgcaagtacacttatttgtagcctagatcaagtgttcaaagcgggaccttcagatcagcaatatctgcagcatttggaaatttgttagaaataaaagttgtcagcccactgcagatctaccgaatcagaaacagaaaatgagacccagcaatctgttttcacaagccctccgggtagataatgctgatgcatgctgaagtttgacctaggccatgggtaagaatctgttaaggatgacaagttgttaaggacaccagcaccttctttagatcaccttggctatgagggatggagctgagctattgccagttttgtccggctgaaaatctttgtcaattgattagaggctcgtttcccggattgctcctctggattctaatttctcagtgtccaggttttatcaagagctgtagtgtctcctacgggtcctaagcttcctttatgacatggctcagaggagtgactttctcaactgcacacagagagactagggtctctataggtcaatggatattggaacacagagtgaatatatattacattagtccattatgtattgtattagtccattctcacgctgctataaagaatactacctgagaggccgcgtgcagtggctcacacctgtaatctcagcatttttgggaggccgaggtgggtggatcacatgaggccaggaggttgagaccagcctggccaacatggtgagtagactaaaaatataaaaattagccagacatggtggtgcatgcctgtaaggattaaattagccaggcatggtggtgtaatcgttacaggcatgcaccaccattcttggctaatttttgggaggctgaggctaattttttgggaggctgaggctaactttggggaagctgaggcacaagaatcagttgaaccgggaggcagaggttgaggtgagctgagattgcgccactgcactccagcctgggcaacaaagtaagactctgtctaaaaaaaaaaaaaaaaaaaaaaaagaaagaaagaaaaaagaaaaaaaaaaggatactacctcagactgggtaattataaaggaaaggggattaattggctcacagttctgcatggctggggaggcctctggaaacttacaatcatggctgaaggggaaacagtcaccttcttcacaaggcagcaggaaagagagtgaatgctagcccaggaaaaacttccatttttaaaaccatcagatcttgtgacactcactcaccatcacgagaaaagtatgggggaaactgcccccataatccaattacaattacaattcaaggtgagatttgggtggggacacaaagccagactatataatatatagacagaagacactgaatttagaagacaacaagatgaataatctttctcacctcaaaaagacccaggtattaaccatccatcttctggctggggaggggttgatagtgtcttgttttgtcctgccattcagatatcatcctctaaggaacaacgctcacctccatatactttcttccttcctttttttttttttttttttttttgagagcgagcgagcgagcgagccaaggtctcgctttatcacctaggctagagtggagtggcgtgatcccagcttactccagcctcaaactcccgggctcaagggattaagggattctccttcctcatcctcctgagtagctgtgaatacaggcatgcaccaccatgcctggcaaattttttttttttctttaaaggtagcatcatctcactatgtcactgaggctggtctcaaacacttggcctccagttatcctcctgccttggtctcccaaagtgctgggattacaggcatgagccatcacaccaggcctgaattctatgcttgatatgctatgtcttactctctcagaaatcttctggacaactttttttttttaattttatcattattatactttaagttttagggtacatgtgcacaatgtgcaggttacatatgtatacatgtgccatgctggtgtgctgcacccattaactcgtcgtttagcattaggtatatctcctaaagccatccctcccccttccctccaccccacaacagtctgcagagtgtgatgttccccttcctgtgtccatgtgttctcattgttcaatccaacctacgagtgagaagatgcggtgtttggttttttgttcttgtgatagtttactgagaatgatgatttccaatttcatccatgtccctacaaaggacatgaactcatcattttttatggctgcatagtattccatggtgtatatgtgccacattttctcaatccagtctatcattgttggacatttgacttcccagttttgttttgtaaattctgggggactactaacatgttggtgatgtagagaagcatccatctttcaagctattctaggcattatcctttatggaagaggactttggggtccttctctgtagggggaattaaagattgtgttaagaaaaggaacacctaatttgttgatagacctttaccttgactcagcaaaatgcctacattggaggccaaaacaagttccatctctcagctctctggcctaatgacccattgttttagcatgaaatcataatgggacaaaatttaaagaaagcctgggtgaccctaatattgtcaacaaaactggatgtaatttctaagatgtagacaaacctcaaaacttctccacccacacaaacatataccagatctcattcttttggagaatgttgactatttcataaatttgaaaacaaaactgaaaaaaattgttgatttatcttttccagcccagaaatggacaggtaccttacacctaaagggtttccactgcaaatcattgacctaacaagtccaggattcctgtatggatgatatcattataatcaagactcagctatggttctactgtgcttcatatttcactcatctacaaaatgagaatcttaatagtactatcagtaatgacacctcctgttttgaggattaaatgagttttaaaaagcaaaaagcacttaaagtatcacctgatccataggaagaagtttgatggaagaagtttgacaggtccatttgacagaagtttagctattattggtgttaatgtattgttgactattattattatcagcagcagcattgtttagtttttttagtttaataggtaattttgaaaagcattagaaaggacaatgtaatacgactcagtgtctgagatggctctgatactttgagcatggctgagagaagaatagtacccttggcagatattcagaagccaagtgcaagagctgctttcagaggaaaatattgttaaacttgatgaatgtgatgcagtggcacaatattatttaagtgaagtagacccagaatttaagatatagaatgggaattgaaaagtcaaatatcaaataaattgagaaaaatatgcacagatgaccaattctagtctcgtttttagcaaataaacatagaggaataatgagaaggctctagaatactccagatcatggaaagggtgacacagagataaagaaaaaaatagagaaagaacagtgaggaaaatgagataaggatctaactccttcactctcctatcccttgatttattaattcttcatccatttattaatttgtttgttgacttcatcaagattgccctgccagattctagggatatacacttctggccccaaattgccaaggcgaatggagaaaaccaccaaagacacagaaacttatattacagttgcgcaagtgctacagttgagatataatcaaaatgttgtagacaaagagcagtatcactgtgcaaaagtcaaagaagaaggtcatagtttggtttctgataccactacataactgaaactacaccaggagggggatgacttcattgctcaatccaaggcagatgtttacgacaatgacaaaaaaaaaaaaaaaaaaaagatgggctctgacttccagtcctcatgacacagagaccatgtttcctagcactgtttcaaacatgtagcagtcattggtaataatattaaaggaaaacaaaacagcacagggttgtttactctctagatgaacacttccatgaacgtgaaatagaacagaaacacattacagaaagtagaggataaatagctagtaccgctgagctccagcaataaaaataacactattgtgttgaagtttgatttcaacacaggacttaactgacagcttaatagagacataatcagtctcttatcaggtggaaaactgatgccagatataacatgcaaagccagcggcttctatggtactgccatccaaggaaaagggctggattgtttcctgggactgcagctcatagaaaactacctggggacatgagcaggagcagagacaagcacagaaatagacaaggacctgggtcaaatcatctgctgagtcagcgactatcagcattagccccatatcacataatagagccaccctgagtgggcaggaggagtcattctcagaactactggctaaaaagagatccagagacagaaacaaaacatccactgactaaactatgtctgcaatctaaaatttcaaagcatactaagaaagataatcaacaaaccatgatcaagagaattcacactgtactagaaggcaaataatagagtaggctgaagttactttaaattatatttagaatccgtagccatagaaagtagtgaaaaacattcataaaaaagagatttttttgaagtaaaagcaggcagatattaataaaaatacacatatataaaacagaaaaattcaaaatcataaaaagaaatatggtgaaacaaaagcaaacaatacataggataaagtttagtcttgatcaagtctaaaaaataattagtgaactaggaagtaatatctagagcataaagagactattaaaaatatgaaagaagttaaacaacgtggagaatgaaatgagaagtcctagaagcaaagagacagaatagcagagaagatagttttacagcaacaatagaaagcattagaaaaataaatgtacaaaccctcagattctcagactaaatgtgtacagtagcttaagaagagaacacatacatacctcagccagatatatcatactaaacaataagattggaagaatgaagaaaaaatattaaaaatgcaaagacatatgcctaacaaaagaactattatgtcgtgaagaatggaggcaaaaatgaagacatgttcaaacataaatacccccaaagatattttttaaagtcactaaactgtgctcttcagcaaaataattcagagaaaagaagcaggatgtaagaaataaaactgaatacaaaacagtaaatgtgttggaaaccataactaatttaaattaacctgcaggtgtatatgtttgtgtggaacaaattgaaactacattttgaaaaaccatcaataaatcttatattctgcctatctgcagatttctcctatcttgctatttttcttatttagttaaaagcatacttttgaccctccataattttttttttccatttttctttactcttgctcttagctttccccaacattttcttgctcaaaatttcagtgcgtcagctggcagcttggcctcagaatatgggaaggtactgccgtctggcagcgtcaacttgagttacggcgaagacttgttttccattgtgccctcccctgtgtgccatatccatcctggccattgtgccaggtgaaataccaacgctcgctgatgtggaagatgcttcatcgggaggcaatcagctctgccgagagaggggagaaagaaaaacacgtgtggtttttgccgccttcaccttggcagagaaaagtggatgtaaaactggggctggggtacagccttcagagttctggaagatcagcgacgccagcctgagccaagaaagaacacatggtggttgtgtgtggcactgacacctcaagaaaaatcactttgagtcgtgcgcctgatcatttaactgctatgggcacaggcccagctttctccccaagtcaaatgtaaatggtttaaggaagctggtggtctttcttcccgctccacttttaccatactaagtgtctcacagccattttactgtgtttaccaattatgaaaattctgggcagctaattatgaaaatattgagaagtcgtatgagaactaactcttggagtcagtgaaggcagagaacagactgtaaagtctttgaaaaatgagctgcttgctctccacttctgccagtaaattttggtattccagcatattgccatgttaatctgaaaccaaaaagaaggaaatcaataaaaatctaggagaaaaggaagggaagaggcaagccatcaatgcttaggagatgagaaagggctgatcagtttctaggatccatacattttgctccccgtggatcataagccaaagaatccagggaaaaaatatgaaaaacaagttttatgacctaaatgagaggtgataaactttaagttctctgtaaaaagggacagcctttcttcgagtctgaccttgctgttttcataccatctggaaagaaaatctagttgtcttcccccatttgttttatgctgaataaaattaatgcacgtgcagtaataacagaaagaatataagtacattctagactgattataaagttgcttagatttcatgatatatcctagtaatttaacaaatgtgggtttttttttcctacaatgcctttctttcttgcagcagatttctttagctaattttttatgttaactaaatctatacaaaatagaactattgtcatcctcgctgtgtagaaaagacaagtcatgacaaacaaatattgtgcaagtttatagatggtaaaataattttagaaaatagttatgttgttgtgtagtcctataatctctccatcagaaaatgaaaccttctgtgtttagataatattaggtaaagttcactttatagtccatcctacaacctcagactgttatgctataacactattgttaatgtcttaaattgcattaaaatctaaagtggatattgtctagtattagtataagcagcccatgagttatatcatacagaggtagcattgccatgtacacgcaacataaatacgcatcttaaacttagaatcttgtgaaggttattaagatttttcactctaaatccttccattttctcatccttcttgatggtagatttagaagttgtaaatgaaataatacaaattttattaattgataaaatataaagtataatcacattttcaacttcccctattgtttgtttccataagaaaaaggttctaagctccagtcctgagctccttattcaatattagaagtcaagaaacttacaaagcttttcctgactttccattagcagaaagctttataaaagctgccatttatgtaaagtacagaaaggcaaggaacatacacatttacacatgtgaaagaatgaagaggaaaagaaaagctatgagctgaattctcaatgcacacagtatttgactgaaatacaaagctacctaataatttatactttgtattttaattgggtatctgcatgaatatggatacatgtaacttcagtacattttaactggaacatcatctgtgttacatgtcattatattaaatgtcatgataaagagccattacatttaagtgtgttatattgtcctgttacaaatgtctaggaagttgccaaaaagaaaatgtgtttggtgtgacattgctcattcttagcgaagccatgctggttgttaccattccttaatgcttctgggagcttaaaagtcattttgtttacacctagtcctagaggctttcttttgaaggcaagcatttctatagcttgaagaatccacattgagctttagaacctttacccatattcagacttcagacatccttcttattctccatgcttattcacagataccagacatctgtttaatgtgtttacttgccagtgctgtcaatatactgcgggaagtaaatcagccgggctccaaagtttgaattcattcaaaacagctcgggatatatctaaaatatttgccccatctttgttatcataacccccattgcaaattctgctgggtccttttcattgcaaagctcatcctgcttgactgtaaatacggaagttaaataagaaaatattgtgacccagtttggtagatggtcactaatgatggtcattttttttattattttaacaaataacaagttttttttagtaattgattttgaagttagagtataaagagaatcagttacagcagaaaaatataatgattgtgattctgtgatgcagacatttctcactattttgcctaaaactgggatgtcatccactgactcttgcttcagctgctaattagttacatgattttgatacacggagacaataattcaagtattagaacataataatcatcttctgcctttgggctagacatgtctaagtcaggcaaagtttgtctgtgtgtaattccaaaggaatacaaggtgaaaactgtctcccccagttttttttttaagcctcaaacagagatcaggttcttcattaaaaccatgaagcctgggtgtggtggctcacgcctgtaatcccagcactttgggaggccgaggccggcagatcacgaggtcaggagatcgagaccatcttggctaacatggtgaaaccccgtctctactaaaaaaaaaaatacaaaaaattagccgggcgtggtggcaggtgcctgtagtcccagctactcgggaggctgaggcaggagaatggcgtgaacccgggaagcagagctggcagtgagcagagatcgcgccactgcactccagcctgggcgaaagagcgagactccgtctcaaaaaaataaaaaaataaaccatgaagtgcctaatattctgagaaagaattttattttttcctttctctctgtctctttctctctctctgtctctcagcatttaatgagatgaggcagctagcaacctcttttccaagaggttgccataattcagttatttgacattctttctgctaaggtataatttaaaaatcaacagtgcacatctacccacatggaaacttcttgagaatttgggaaccgaccaagaacaccttgtatcctatcatcttctctctagcagcactggaaaggtacatgctaccaaaaaccctttcatcaggttgttttacgagggagaaaggatgctgtctaaggacatgaaaaccatctggaaaaccacatagttgtcagtactatggagatggtaagccttgagtcttcaaatagagtttcttttttggcttttaccatcaaagcctgatggtttggaattaggttgatattgcctttcaacgtatgatattttctttgcaattgctcagaacacagatgtaaaaatttctatcatcatttgaaaatgaatgtcccactggggaaattccatgagtatgtaagtagttgctttgttactgatgcacagcttattccacaggattcagtaatctttttctgtataggacagcttaaaaatattttaggctttacagaccatatgatactatttacagatgatgcggtattgttgtggtcgctcaactacaaaagtagccatagatatgtaaatgcatgagcatggttatgttctgacaaaactttatttataaaaataagaagcatgattgtgttctgataaaattttatttataacaagcagcaagttgaatttggcacacagatcataatttgctaaatcctgctctagactattgtctagcttttaagaaagctttgttgaggagagataaaattgatgccagttattatctcaatagatttagaatagcctgacatactttcagtattcccaggctctgttagggtaggttaataacaagttgctatacaaactaggtaaatgtgtgttaaagttgtgtgtattcactacccatgcatcttaacacgatagtgtcttaaaaggatgaggcagattctggattaagggataaagagcaacatataatcaaaagttggaacatgggcagaaaaaaactggaaattggtgctgatggttctctaccacttctctcaatagatatctcttccttttctttgcctctgcttgttctgttgttttcaccttcgtcacctctttcctttattttcccctattgtattcttctcttccaacagcattgcctctgtataaaatcatcatgtaaaaatgtttctgggcattttctttctaatagctttattcttctagtgttgtctccagccccttggcagataccagctatttgaaatctctaatctgcctccccttacaagacagagaaaataacaaatatctctcaattcccctttatacctctcccaaatgtctctcccatgttttcctcattttctcctgtcttaaaacaaatatggatcccactcctctacaatttgaatttttcccacaattcttttttttaattatttatttatttttttagatagagtcttcctctgtcacccaggctagagtacactggcacgatctcggctcaccgcaacctccatctcccggattcaagcgattctcctgcctcagcctcccaagtagctggtatcacaggcacgtgccaccactcccagctaattttttttttttttttttttttttttttttttttttttttgtggagacggggtttcaccatgttggccaggctgttctcaaactcctcacctcaggtaatacatctgccttggcctcccagagtgctgggattacaggcatgagccactgcactcagcctttttccataatccttgattcccgtccttttagcctcctctgacatagaccttgacaagcgaatcattctttgtctttttatatgttcaattttcctatctctctggcttcttttccttaacccacaatatattaaggtctcctctatatttaagaaaattaaaaccgttgttgtcacatctgcaccttctgcctcctgtcttaacccctttccttcaatccctgctgaataccccctcttaggcctctgctctcctttctgctctccaggcgtctgcctggcccaccactttctctctcaatgtttatcatctcggctctcatctgatgatccccaaatcttcatcccactgtggtgtttctctacagtttggatctaagtgtccagttccacagcatgtttctaaacacagagcctgctgacatattgactcaatatgccctaaaatttaactaatcagtttcctgcaacttctttgtatcctctataccttcaaatctgttttgttgttgttgttgttgttgctttgagaagaaatctcaccctgttgcccaggctggagtgcagtgacacagtctcggctcactgcaacctccatctcctgggttcaagcaattctcctgcctcagcctcccaagaagctgagactacaggcgcctgccaccatgcccagctaatttttgtacttttagtagagatggggtttcaccatgttagctaggatggtctcgaactcctgaccttgtcatctgcccaaatcagtcaagtcttccaagtgttgtccatttctagaatttacccattctctctcctttaagccctaccaatgctactctaaactatatcttctttttttatctggtgtttaagagatttctcactgattgcttaatagtcttgctcttccaagacatcatcacactgtttctagggttcatactatattatgcacctcttcaaagaaatgagtgatagcttttcaccctttgtagtgtgaactaaaatctgcttagttagcaaaactcagggctttttccactgtactacataattattcactctatctaatctcctttcacccattattccaatcacattgattgagtctgcaaatctaacactacataatcaacctttctaattgaatatatgccccatatctaatattaagagtttagaaaaatattaaatataatcccatatctcaaaatctgctatttccctttttagcatgatgctgtcctcctctccttttgaatgtgtgtgcacaattcacctgctatttaatattctgattttgcaattatcacaaatatttcatatttccaaataggcagataatattatcttgttaacttagtacaattcaacaaagagtcaggtaaaccagtcaatgtggtgaaaagcatgcttgttcttttctgcttagatgtggcccatagcaatgatcatcatcatcttcatcatcatcataattatcaccagcattcagagagtctagaatttttaaaaatatttttcttgttggtcctgtgctttctttccgctgatctgatacttttaaatattataatatctcatgtatataaataaaatgattttaggtcttgttaaaattattttttcaagataaattcctcccagaagcaaggttatgttatcaaagaacatgagtagctttgttactcatagattttcacacttcacttacattcactgtcctgctcccttagcttataatttcacccccaccaaccacccaaacacagtcatacaccctctctctttcactctccaattaaaatcttcttcacagacttgctcttatacctctttctacacaaggcttactatagttcctaatcagaatcaattatgctttagctcgagcaaactactaagtctctcggggtctccattagattataatataagaataaaaagaatacctacattatagagttgttaagttatagatctcttgagagggtgcctggaaaacagtgaccatgcattagatattagctatttttataattatgctaatcctcccaagtacagtgagctccttaaatgcaatcagcataggctcatacttgtgtccatctcaccccatcttacacaatgtcttccactgagtaagtggcatggaaacggccatgctcaccaatgttcagcttcactgcttcttactcagcatattcctaggcagtgatgtgctcagtcagcaccatgctcgcttgtgagagcagactgtgtacatcccttcccaattccatccacatttagcaataccccatttttatctggtcttttttcaagagatttctcactggtgtcctaatttaatagtcttacttttccaagacatcatcacaagcttgaacctggccatggcgggagttatttacgctgtggaaaatggcaaatcccatggatcagagattttttttttcccctctggaaacccaactgtcaaacttttaccagcatacctatgcttctaggatacattccaccccttctcttacatctgattgtttctgtatgaacactgctcagcaacagaatgtaagtagaagtagcatgtgtcactttcaggaaacaacaacttggaacaagtatgcctttgccatattcgatctctccttttttttttcagtcactacagaggattcagttgcaatcttaaaaaaaaaaatggagctactagataaaggttcctggatccctgaattactctgtggaacagagaacctcttcagaccttcatgggattgttacgtaattcagaaataaggctttattgtgttaagctactgagatattggggtagctattataccaattaatctaccacaatactgtaaggagcccataacattgagacaagaaagtagtcattaggtcaaataagcacaagttggccctcaatgaccagtataagactgtttagctaaatagcttaattttccctaattggctagcatagaaaaaaacatagcccagtaaacctaaatatattcctcctgtggcattgtgcaaccaactacctctggtatcagctagcaggcttgaatcaatgggcaactgtaaatgaaactgcatgtaactaattctataatttcaagttattcagtgtaattccactaaaattgcattataaattttgggcattatgaaggatttaaaattaaagaaaacaggtttgaataaaacctcattattaaattacatttgagtggcagccaccattattgcaaagcgtagactctaaacatattattagcatcaaaaaatgtttgttttgtatctttgtattaatgggaaaatgcagtaaacataagtagaagattttctatttgggggaaattctcaaaaacaaaaaaggataaattagtagtaccttaatggaggtaagctttctctcttggcatctatcaagcacttcttgccccactgtcagtatgatcagctctacccagcagagactccaaaagaatagagagtctcaagaaaaataaaactgccttcttctggtctggaacattgggtgctttcacattgatcttttgttagtggctttttaaaatttctttctttttttaaatataaaaaggtaagaatgctgattaactatgtgggtgacagatatttgaaaagacttcattccaataactcatcagctttagtgttttaaggcattgcagaaaaaaaaatggataaaagaggggtaaataccagtggttatacccgcatgtcctcctggtgatgagagcagttgcagtgaaagccagccaagcccacagggaaaataccaggttgatttgaacatggcacaaagttgagttccagaaatcaattcctaactccctagtaattcaaaaattggaggctgcctgtgtgtagagaatgatgtggtatccctccctcccaaagatatgacattcccttttctaaaacccatgaggtaggtgctctcttgggaaacttttggaaacataatgttatgctatgggtagaaaggagacatggactactattcctgagcatgtggaagaactatattctatatagtgcatgaaatagcagtttgggcagcgccatctaaggctaaattgatccatatgattggaattttgcccagaccctttaaccaaagggggggaaaaaggcatcattttgaaattagcattatcaatacggtaatacattttgaatgctagtttggcctgacataggaagtgatgtaataagggagagcttactgcccctgccccttgaacaggaaatattttccttgaggaatagaatacttgaaaactgcagattgcattttaatattaaccagatttctacattaaacatgatttccgagaacaatttgatttttcttttttttcctctctctttacccccactgcacccctcaagcaagtgatcagaactgcactcaaccacagccagctcctggaatggacccagggctgcctgcaatttaaatgtcaaacttggtgccattgagtggtggagaatcactcagcaacatgtgtcactcattgctgccctgccaatcgttattgtttcttgctgctttcagattgctacaaattctctcccggtttccttgattatctccaagtgtgaaaatttaaatcttgtttcttcttcactctgtttaagatgtgtaagcgtaatcaccttctagaacaaccaaggaacaacaagaaaattaccaaacctgtcttatattttgaaaggcacagaatggaatttttttaagctcctagaactagtttctgtaactaactgcagagttgaaaacccttttaactggctaaacatacctatccccagtggacatatacacaagaatactaagctaccaaaaatggcctctctcagggcagacttgacagcagtgacaacccctgattggttaatggaagcacttcaggatttatcagttgtgattgctttagtctttggcagccggtaaaatcataaaataaagacgatttaaccacagttgttcagggacaggggaggtggttgaagcagggctacaagtaatgtgctgtcattcttgattggtagaaagcagatggttgtgaaatgggggccacaaaggaggatgaataaggagaccaagaatatagaattgcaaggcaataaacccaaagcatgggtactggattcacgcaatggcattcatgaggttgataattacagccttataagataatgcaggatatatggtaagcaatggttataaacagagtttatatggctttgcataggtaaataagaatttctactaaatgggaaaagtaaggaattaggaaaacaaaaagtaaccgtgaagtcactctaagcatctaggaatataccacactcccaaaaaagcaatgtcataagcaaaggaacacatacagcaaaactgttagtatgtcctcactgtcataaaagtgaggagcacttttatgtgctcctcaataaaagtcacaaatggggcagaaagcagtcatgcacagtaggtggcattcacctgaaaatgacattaccctctccctgcagtgagagttcatttcttcagcagagagaaatgttttagacaagacctctagctcttgggcattagaggttcttgagagaaaaatagcacagttattaactctttatctcaatgcagcataagtgtctcagagccatatcatctccttctctatattcacatcctcaatctggctttatgaaggaaggaagaaatctaacatttatagaaaacctactatgtattagactgtttattctatatattaaattttattacatcttatatccaacaaccctctgaaatagacattgtctcaacttacaaaatgagtaaacaggcagtttatcttctaagatcacaaggcacaagatatgtgtgtgacgtattcaatcacagaagcagaatttgaacttaagattgcctcaaagatgtgtgcccttttcatcatatcacatctgctactcacaggagtcagttctcagtttgagctgatatctggcgttatcagtgaatagcactgggcatctgtgatttatttttctcagctttttctcattgtactgatccaatatccagaatgagtcttttgccccaatattcctcctttaatcactccagtgtctgggcctgcagtcaaagtcttctgctgatcccctggtccacttgactgaagacctgcctgtctataacacagcatcatcctaagaccttcattctttcttctatgctagtagtttctgcaaagtagagctaaaccttcaggatgactgcttcttgcctgactcttccactgatttgtttactcccatatactgaacccactccttcacaaacacacccaatttggaagacattttcctaattctagaagcagtgggtacctgtagatgatgttctattagagcttctataagaactgcaaaacacgtaaaagtgtttttagtggttttactttcaactaggaaaacacctgaagcaaaactgatggaacaaaggcggaaaaagacaagtttatagttataaagatttcagtgttcccattaattggtaagataaatagatggaaattcagttggttacaacattatcaataaatgtcattaatatctacagagaaataaatttcaaacccacagagtacaaactctacaagtccacacgaaccagtcaccaagataaaccatatgattggctctaaaataagtctcaatagattaacaaagattaaaatcaaacaaagcatatttcccaactacaactgtaattaaattaggaaataataatagaaatatttctgcaaaatattcaaatatttaggaattaaagaacatgtttctaagtaactcatggatgaagaaaaattactggctatagtaaacatttctgattaagtgaacatgaaaacacaacataaaaatccatgagatacagcaaaagaaatgcttagaatgaaacatgtagttttaagtgcacctattataaaagaagaaaggtccaaaatccatgatacacacatcaccttaagaatcttaaaagaataagaaaaacaagaggacaaaatataagttgcagaaataataatcagaaagaaaaatcaatgaaagcgtagcaaggtaatttttaaacatgaataaaattgataaacttatgccttaaccgatcactaaagattaacgaaatcaggattaagagagggaacatcactgtgttacatatactttagatattaaaagataataaaaagtataataaagaatcatactaacgaatgtgaatatttagatgtaacagacaggtactttgaaaatcaaattggccaaaactgatgaaagaagaaacagacagcgtaaataatcttctgtctgtcaaagaaactgaatctgtaattacatatcttccccaaaaaaggattcaagtcccataatgtctttggggtgaattctatcaaggatagaactgttattgtttctcgctgcatttaggaataaagtaatcctatgcacattttttttaggataaaaatgagaaagcaacattcttcaacactttttgcagattttgcactgatagcaaaaccataaaagacattgcaagaaagatttgtagatcaatattactcatgaatgtagaaacaaaagttccaaataaaattttagcaaattaaattaagaaatatttaaacttgatgatgtaccaccatcaaaaggtattattatcccaacaatgtaaaattggtttaattttcaaaaatcagttgatatgcttcaccacgttagtaaaataaaaggaaaaaaaaaaacctatgaccaactcagtagatacagaaaataaatttgacaaaattaaacattcatttgtgataaacacttatagtacattaggaataaatagtatatttctcaattttatgagggcacctacagaaaatctttagttgatatcaaacttactggtaaaagactcacagctttttatctaaaatcagaaacaatgcaaatatgtccattttaacgacctctgttcaacattgtattccaattcctgcccaatgcaataagacaggaaaaaatagcatacagactggaaaaaaagcgacaacacactcttcactgatgacatgatcacaaacacagaactcccaaagataacctacaataaagctatatgaacttaataagtgtctttatcagagtcataatatataagggtaatataagaaatttctatgaaaactgcaggaatgtttcatacagctatttttcacatactttgaatgacggactatgagatgctggaaaattcactttagggagaatcaagatatctagataaatacaaattacgaaagacatcctctcttaatgagaattgagcccgctccacaatgtacatcacttgaaaccaaactctctctctctctctctctatatatatatgtatgtgtatatatatgtatgtatatatgtatatatacatatatatatcttatagtgaagttaaaactaagatataatgatgagccaaagttattaccaattatgaaaggtaatatcattttcaggttgctgaaatggaattccagcatataagacattaattgccaatcagaagagagatgccatatatataaagaagctctggacagaagattaataccaggagcatcgaatcacttcttaagctaaggcatctaacttcactttagcacctgtaatttgtcattattatttagccatgaaatgaaaaggtgagccaaatggtatgtgccttccagtggtaagtttatgttggaatgagatattgggccaccggagctgctaaaatatgttttaatgaattcataaagaaaatccagacacttaaaaaaataacaaggcctacaacagtgtatttcaacaggtttgctaaaggggaatcaatatttttccttgagacttacttcctctgattctgtattgcaaatatagacattgtaaaatgaagagatcattggttccatcttaaatactaatgagtcaaaggccagagttttaaatttaaggcctagatttgtgatagagctgcttctcatacaggcgactttacctcatacattccagattgtgcatcaacaggaattatttttcatatgctccctaagtaaatagaatgacaaatatacacaaaaactttgtcacaaagttaaagaattatcacagctctgaataaattactataatcacataaaattattataactgcaaagatgtatttttttattaaacttcatgtgacaatggttaatgattgtcctgaaaaaaaatgctaggtgatacagctactaataatattaataacagtctacactttacttttaccatgtttactatggacagtattctttgttacaatgcatccaatcctcctaacaaccccaggaagaatgtattattattttctccattttggaggtgagataatcaaggtacagacagtttaaattgttgccaaggtcatttagctagtaaatggcatggtttcttttcataagcatgtttgtcagggttgagatttataaacaagtgtgtcatactctaaagaccgagctgttaaacactatgatattctgtattacaaaccaaaaaaaagtaaaagtatctagaaaaaccagacattctgtagtttttctcccaccctgaaaagctttgtgcacaaaatataataaggtattgtggaaatatgaaattaatcataagtaattgtttaatcttttagttattagaatttgccatttaagaaccaaaggctaccacataaacaagtgacataattttaccaaaatagtcacatagaaaacaaagttaaaaaaaataagagaactaaataatagtccatatcgttgaagtaattagaatgatcaactctattaaagtctatgtgaaaacacacagacacaaacacacacacacacatacacactatcctttcttgtaattttttgagttggtataccagaatttcaaataactaagcttttatacatcactgaattctaatcaaggaataaaaaggttctaaaaatcgccttgaggaagtgaaaaccaaacagcttctaaacacatttagcagtgagaaaagcggctttcatggtgaaaacagtattggggtgaatatgcaggaaaaaaaatcagctaatggctaactgccgcaaagactaataattcctgcagaattatggagaaaaagctgaaaggatctctgaagatatctgaattcctccctcccttctccatagtaccagggatccttaatccaaaccattctagatagaagggtctcttctttattttaaggaaatatccggagtctccaatttcaaaattgccctcactcacatatttcgtatatttcctccggcttttgtaaatctctctctttctattaagtaaatctaactttcccatttgagtactgggtttggagaatgagtattatgtaagccttctctttttccctatccaagaaaatattcagagacaaacaaagttccaacagagcgccagagaaatagctctacatcttgctatatatgttgctacatcttgctatatatctggagatccttgtccaccaccttttcctacccatatcaactctcaaacaaaaaaacatgtttgagcacacaaatacacacacacacacacacacacacacacacacacacacaggccttcctcaaggagctttcacccaacatacattctgggatcattccattctaagctagtcccattttctttcccaagtgtgatctttgaaacacagagcacatttttcatatttatatatggtacttactaaatatatagattccatggttcctttacaggcctatagaaacagaatgtgtagggcttgaaccctggaatctgtattttttttttttttttgagacagggttgtggagtcctaaggagttaaaagaaaactgaaaaatggacttagctggcagggacagaaacagggatagaggggaacaaatgttccaagaaatggggtcaactgcaaatggctcacatgcacgcaagcattctgtctgcaagcattcagcctaagcagcacgatcttctaaaattctcctccagcccctgcctcttggcagacagccttctttccgctgtcttgcccgttgcttccttgcaatgtctctctccctttcctctaaataaatctgcttttctaaactcactattgtcttggcaaattcctttactatccttgtgccagcctcagacagtcattgaccacgacaagggtctctattgcccaggctggagtgcagtggtgtgatcatggcttactgcagcctctacctcctggggctcaagcaatcctcccacctcagcctcctgagtagctgagactacagacatgtgccaccatgcccagcaaactttttttaaaatattttttgttgagacagggtttgcccaggctggtctcaaactcccgagttcaagtgatctgcccacctcgggctcccaaaatgtggggtttacaggcatgagccaccatgcctggctggaatctgcaattttaaaacaagctctttctgcaattcttacaaaaattaaaacctgagagatcccaagtgagcttaacatcaggcgtcaaaggctctagtttagaaaggctattcttgctttctggcaggaaactaaggtgctcagacaactgagtgcctttagtgaacggtcccccactgttcaaataatgccagggtctcaatcaagagcaaggttcaaagatacctaaaattgccaagatatgcaccctttattaatcagctatgtattaaaagtgaatgatgctctctcactgaatactctggttcacccaaaacgccaaaatgccaatgaatatctcaggaaagaagatagctcttttttgaggttctcctggctccccttgactttgtggaatttccatctgaacataacatgtatttttgttaataataatgaggaagtccctgaaacttttgattctatgtcatctttaaaggaaacatttggctttcattagtatttaagcatagtaatgcaaaggataatatacatgaattggcttaactattggacatctctgtcaattcttagcatactaaaaatgcgaaaggatttatcttattggttttcatattcttcaatacgccttattatttttgtgacttttcttgaacttacagacttgatacaaaaacatctcccagcatgtagaaattttatcatttgggggaaaatatattttaatatatctccagtgttatgcaaatcctatagttggggcattgaataattacatctatccatacttttttttttttgaggcggagtctcgctctgttgcccagactggagtgaagtggtacgatctcagctcactgcaacctccacctctctgtttcaagcaattctcctgcctcagccttctgagtagctggaatcacaggcaccgaccaccacgcccagctgatttttgaatttttagtagagaaggggtttcaccatgttggccaggctggtctcgaactcctgacctcaggtgatccgcctgcctaggcctcccaaagtgctggaatcacaggcgtgagccaccatgcccagcctctatccatatttttttttaaccaaattgcaaggtattgatcatattatctaaactacattagaacaatggcacatgtccaaaaaagataaagtagtgtcattttccccctttatatgaacatttgtataaactttaccaaatgcaaattaatctatagtgactttacatgttttaaatgtaaagtctctttctctgaaagagagtgggggatagggatgagtgggtaaataggtggttgcattggaattgagtataaaaaagcacaagtttgggagtaatagaaacattgattattttgattgttgatggtttcacaggtgtccgaactaaataaaatgtacaaattaaatacatgtagtttatttcctcaataaagttgtacaaaagatggatggaaagctatgtaaagtattatttacaagctaaatcaaacaaggatgggttgattacaaatttgtcttttttgcatatctttttccccactggaatcagagtacttgctcttatgtcaaaaggtcatctcttattacaaatatcaagtatgttccaaagtatgcaagtcattcaaacagcagaagtgggaaagaaagaatccatctaacagatagtgtagggaaagtatctacagggttttaatctaactttacaaaaataaacaaagactgcacgtatgttttgagccttggtttctggtagaatggtagtgctaattataaaattagggatttggaggagattttggttgagtttggatttaaaatatgtaaagtctgcagagtcagtacgacgtgtatgaaagcagttggaaatgtgaaactgtaatagagggcagctgttcccattcctgctcttctatttaatattttcatatctgtttagagtagcgctgtccaacagaatattctgcaatagtgcaaatgttctatctctatactatccagtaggatagtcactagtgactgtgactattgaacatttgaaatgtgcctggttaataaataaactttaattcaaattagtttaaattcagtagccacatatggctagcggctaccatattagacagcatagatttggaaaatcatgacccattcaaaatcccaatctaggaacttcagataaaccaatctaactcatttttaaattttccattagttctttattgaataaatattaaatgcttatattgttttgtgtattattgtattcccaccatttagcacaaataaggtcttgccgtcatgaaagttttgttccactctgtcccattggtcaccaaatcaaattccagaagttggaacttctttcaactttaccttcctcatctctgctacttttaataaagtcacaaggtcattaaaattcatccaaaagggggaaataacctaaacattttgttttagttgttgttgttgcttggttttggtagtgcaaaatggaaataaacgttgcatttcaaccagttattgtgatgccatgttagaatccctaaaactaaaatactaagtattggtttctcaagcagaagttatgaaatgttgaaggcatcatgtcacatgatgtctccctcttttccactgccaaagatctgctgatagtaagtattggttgaaatacactgcaaaatttgattcagccatctgattgttcatgctgatatatgtgcattggttttatgtatgtctgtatttaggtatgtctgtgtgttgctgtagtctatagtgaaacaagtatttttacccaggtataaaaacaaaccagtcggggtggctcttgcctattatcccaatactttgagaggccaagatgagagaatagcttgagcccaggagtctgagaccaacctgggcaaaatactaagatcctatctctacaaaacatttaaaaattaactgggtgtggtgggcgcatgtctgtagttccagttacttaggaggctgaggtgagaggatcgcttgagcccctggggttgaggctgcagtgagctatgatggtgccactcctctctagcctgggcgacagggtgagaacctttctctacaaaataaataaataataaaaataaataaaagataaagacatcctcttacaaaggggaaaaacacgtttatttgaagtggcccaaatattcaaatacttagtgaaattgtccattatatatatctgaagttctgagcaacaacgtgagcggtgtacgtttttcctgtgcaaactaagtagcataccttctgaaatgtttttcagtagagatttccttaattggtcataaagcctttgtaagcggactgaaactttttaattagcaaagaatggtttcaagtcatgggtgagggggggaaagaaacttgtcaaagactttatcatgtgatcacaaatctatccagaactgtaaatttgtcagagaaacccactgagtgaccctgagggaaaccaagtacatttatgaaggaaacatcaaccccatacgagtgtcaaaaggataggaaatcaatatctgcaaagtctttagactgtcaaaaagacatacttttgccttcgttggctctgactccttgggatacccaaaggaattattagagactctgaacagcaagcctcattaccatagatgtaataaagcttattttctgccgacttcttggttatcactatttaaaagtggtgaaatgctgatagtcccaatattctcatgaaacgtggagtagctaaatctaattattgagtctaaaattgctaacttcctagcaaacccaacaggaattacatgaatgactattttcatgcttttaacgaaaagcaacttgttatattaaaaaaattgttatagtttaaaggaataggagaaaagatatttctgacctaacactattgaaataacatctaaataatttatcctgataggttgcaaataaaaataccataatgttctgtagcactgaattagcttagcatgtggctatgtgtgtagtacatcaaccagtatttgactatgccttttgtaatacagggaacaaagtaagaaagaacaccggtcatctggaagaaatacaggatcctcaggaaacactgagaagatgaccttgccatgcctatcttcagattccaagactcgagttactttatcattatctatcccaaatcctggacacaaagggaaggcacaaagtaatctgcctttccagaatccaaagggattctattgctctatcaccagggtgctttaatttccatcatgaacaaatggtgctttgaaagactgaacatctaatttgttgactgttttcattagtgtggttttcttggtaaccaacatgggagaagtagttgtttgggcctccgagactgtgactaaggcagctcataacaaaagatggctctatgcagagattttgttgttgttttcatttctataaaaatagtttctctcaatagctgcattggatggactttttgtcatagtttaattttcccagtcttccctatttataagaacgtcctggaatgactgctaagtacagatcaccagaccctgccctgcagattctgacccctaaggagggtctgggattccgaatttttagcgagtgtcccttgtctgagaaacattgccctgggtcaccgtcctgctgcaatcaactatccaaagcaaatgttgctgccaaacgatagaacttggatctcagcaagttcacgaaatcctgatagcatcttagttcctctcaccttctttccaactttcatggtctttaagagatgtttatagaaagttgtccatctagctgtcgttacaataggaagctggagaaacttgtaccatggtctgttaaagttgtccttctcatttagaattatattccatacttctgacagacggcttcagaaacagcctgatcatcttctaactattttaacattgacttggcttctgttgttcaggaaccagactccaaggtggagatgtgcatgcactaagtttattggagagctcctgggatatctttgaaggaatgagaggagcaggaacagaagaaaatgctgaacagcaagcattgcaacaaaggcatcagctgatctcaaagagagctgtgggacaggaaggcccttcagaattgtccccagctctgccaagatggctacgtctttattcttccctactgatgttttcttggatgcaggctccccttggggtatgaccttgggcaaggcagttatcttcttcagagagccatcctcagagggaattcaatcatgatccatcagcagtcaactccagctgggaaacaaattagttctgaatgttgtgaagacaagatctgggacatgcatcacaatgtctattacaaaaattggctattgggtatcgagtccaatcgtgctcaccttcattcatatctggttgctctatgtttcaataagaaaacaaataatcttggggccatgatcacctttgagaaacctaggacaccctaaacactttaagacagatgatttaacacattttcaatgcacaataagaaggagggtcaacatattgtagcactaagatgtcaggtttcattagagttagttgtttcaggaaagcaaagggaaataaaacacagagaaacactaacaaagactcatattaccagcctcttaaatacactgaccgtatattggtattttatattgaaaaaaaaggaaatgtgcattttgtgtatttcagtgtatcaatactctcatccactaaggcctctcatcaaccatttagtggtcagacaatcccacaaatgagaagtccaaccaagctcacttctggagttcttatgaatttcaggtgctgtgtgctggcctttcatagtgaacacgtcacagggtactaggcaaacacagcaccagtctactgctaaattgtctgaatctcacattttcaactggagaaaatcatgcttaattcaagtgtcaacagaggtcttgtttaaccaagaaaaggaagacagtgcaatctgtgctccagtgttgcctgtgaagaacccagtgtacgttttctgctgcccttcctgaagtggaagatctttagaagtaaaccctggcaattgtgaatgggaagtaggataaagctcatctacttgcatgttcaattcgagcgcaggcaacactatgaactttgaacatatatggccattgttctggtaaatggtaaatgtttgatgagccagaacccaaatctaagtcaacatgcccccaaagagaacaaaggtcatcaggccttgctgctgattaactcatgctaatcactgatctgataagaggtcttgataattaatctcaatgtcagttttcatttcacttggaaattgccactttctctttattctatttggggaaaaagggatagctcatctcagaagtagtcttctgtcattctcatagtatgtgctcctcaacaaagcatgttccttttcacacttttcttccccacactaacaaatttattcctcaccactggcctttccgttgactattctcacttgatctgagcatcagtggaaaaggaagcaagagaagactatgaccctgttcactgccccagagccttcttccctatcctactgctgcagtgacacaaatcacatgagacatgatcaactttaataaatggttgcaataaatagaaatcacaacttagtgacaattttcccctgctattttataaatatattataaggaaaatgtaaccaagaagtcacacattttgtagagttcttcatctacatccctgcttttgaacttctcatacctattcatagggtctgagcattcttgtgaaaaatcttttttctaaactctgctgtgtgtctttatgaccaccattcaaaagttttacctatgcacttgagttggttttctcccagggttcattcccaccacttcacccaaattatttttacccaagactgagctattttaactggaacaaaaatcaaaaataacactcttgttttataattggggtcaggaaggtgaaagtggtggctcatgcttgtaatcccagcactttgggaggctgaggcaggtggatcacatgaggccaggagttcgagaccagcctggccaacatggtgaaaccctgtctctactaaaaatgcaaaaattaaccaggcatggtgactgcacgcctgtaattccagctcttcaggaggctgaggcacaagaatcacttgatcccaggagacgggaggttgcagtgagccaagatcatgccactgcactccagccggggtgacagagcaagactctgtctcaaaaagaaaagaaataattggggtcaggaaagaagtcaaaatatacaaaggaacagctatgttcaccattggttttctaagtcccagaaaacagatggggcatgtagacgggctagacatcccaaacctagagcagcagtctcaaagggcataggaacttcaggccacatcccctcaaagtcatcccatcagagtgaatttcaaaggcactttcttattcttcctaggatatatgaactgaagtatccgtattcatgaatgaacacacacctacacagacatcctataagaagtcatattaaaaatatataattttctaattattctataacttgcaagacattttcacagtggacttaggatgtcataatattaggtgtcttttctcaagcctctgccctatttctctgctccctttcagacgtaaactcattaacttgttgtatatttgtgttgtctcttccccatcacctttttcactttcctcaatcaactgcgattaactattatcaatatcactctactaaaatagctcttactggggtcaagaataagactcgtgttgccaaatctagtggccaactttctgtcccattttactcaacttctgacaggtttggtaccgttgagtggtctttcctttgacttctatgacacctgattttctatttcatcaatgttcttctttacctccctcctctttctcaacataaattttgtccactgttattttctctatgtatttcctcactaggtgattttatacaatcctgtggcttaaattccctatgtatgcttatgacttctgtattagcattcccaggtctgagttgtctgccctctgtacaattaacaccaatacgtgaatgtgtgagaggcatccaggaagcttcctactttaacctgaccaaaacttatgcttttttcccctctgcatctgcccttttcccagtcattcctattagtagtgcagatcacagtccactcaatttaatcaagtaacaagtctgcatattacccttgattcctctcttatttcttatctcatatcaagtccattaatgaaacatattttccaaacttcaaaatacagcccaactcagctaatcacatccagcactagaattctcaagattttcttacttgtgttaccacaagactccaacttatattttgccttcactcttacctacaattcttttcctacaaagagccaaaattacattttaagaacaagaaccagatcaagtcactcccttgttcaagacccttcaaaagcttccatactatttaaaacaaaatccaaattccctcccctgacctcaaaggccatatatgatcaacctcatttctcttcaattctatcctgcctgactctgaagcaggcatggctgtcttcctgttcctcgaacttaccagtggtttattcttgcatcagatcttttctttttttttaatttccataggtttttgaggaacaggtggtgtttggtcacacgagcacattctttcgtggtgatttgtgagattttggtgaacccatcacccgaacagtacacattgtacccaatttgtagtcttttatccctcactttcttcccaccctttccccggtgtccccaaagtccattgtattatttttatgcctttgaatcctcatagcttagctcccacttatgagtgagaacatacgatgtttggtttttcattcctgagttacttcactcagaatactggtctccaattccacccaggttgctatgaatatcatttcatgcctttttatggctgaatagtattccatggtatatattatatatatatatatatatatatatataatatactatagaatatataacttattctatataaaatatatttaatatatttatatattatattatataatatatatttatatatattatacatataattttaaatatattttatatataattttaaatatattttacatacatattaaaatatgtttttaatatatacataaattatatattaaactatataatacatatttaatatatttatataatagatatatgatatatgatatataatatatattatatactgcaattgtataatatataatattatataaaatataatatgatatatgttatatatatatatatatatatatatatatatatatatatataccatggaatactgttcagccataaaaaggcatgaaatgacattcgtagcaacctggatggaattggagacctacgggggaaaaaaaaagatctgatgccagaataaacacactagtaagttcgaggaaccagaagacagtcatgcctgcttcagagtaaggcaggatagaattgaagagaacacaatttctgtatctgcttattgattgatgggcatttgggctggttctatacttttgcaattgtgaattatgctgctataaacatgcgtgtgcaagtatctttttcctataattacttcttttcctctgggtagatacctagtagtgggattactggatcaaatggtagttctacttctggttctttaaggaatctccacactgttttccatactggctgtactagtttacattctcaccagcagtgtagaagtgttccctgtttaccacatcctcaccaacatctattatttttttgattttttgattatggccattctttgcgtcagatcttttgaacttactgtgcattctgcctggaacattcttcctagatcttcacataactggttctctcaatacatcaagcctgggctcttctcagagagcctttaatcatcctgtggaggtagccaccattcccaccatcattcccaattaccttgctgcactgttttactacagcacttagagtacctgaaattaccttctgtattcgttatttttgtaagctttatgaaggcaaggtctctgtgtgtttttaatcctggaacacagatcagtggctggaaagaataaacactcaatatatatttgtgaaatgaaagaattggttcctttctctcatttcttcctcttcaattgtgttctttcactggttccaagaatcaggccttgataaaccgtatgactttgaaaaaaatctctattcagagtaataaaaaataaatctaattaaacttttgaaattatcccttggttgggtttattattggataagccaccttttctaacaagccactgggacaatctttttgctttcatattgctttttttcatcaccaagccatgttatcattcattttagtggacaacatgtagctactgtaataagcagcatgttatttagagtcaaaatggcctcaatcatcactttctctggaattcatccttgacttattcaaccatattctgactactgaatatggttaatattttgctattcaattaaaaccaaattattacagctttctagttcactctagattctcttatatattctaaaaatccaatttcattccaaaatcaaattttattcctgaaataataggatatgttgtaacttttcgacaaactttgttggtaaaatctgacctaaatggatagaaagttattgatggtctagtctatttcacttaaggtgcatattcatatgtatagttgcaacattgctaaggtgtttgattatgggtggtctcacccaattctcttcttcctgaaaagtccctgtggcaacagtttctttgcccaatagcaacagtcgttaccattttactctgtgctttttcagagataagcatttggatgcaaatgtgactagatatttttctacacaaatgtagcacatactataaacacacacacacaaacatacacacatttctgcaactttttttcacttaacaatatatcatggacatcaataaaaattagtttgcccaattattttcttacagtcttattttacttattttactatatgaatgtgtcataatttatttagccagtcccatttatagatattttaattattttcaatactttgctattgtaagtgatgtaccaaacctcatatcagacatagctgtacaataataattagaaaaatagcccaggaaaatgggcaaaggatattaaaagataatgcacataaaagaaaatgcaaatatattttcttactgatttcacatttcttatagattttatatattcacaggaagtatgaatgtattacagaaattaagcctttatctctgacatgctttacaaacatattttcccaattttcgacttgacattggactttatttatggtatttttataagaagtttttataatttttatgtaatcaaattgttgacctttttatattttaaattttatgaaatttatatattaggaaagacttcccactcaaaaataattgatataaaatgattccatgttttattttctatgctgatacatatctatttacattcaaattttgatttttgggtgtctttttggctaagaggcctggtgtgatccaattttcaccctggaagctacccagtatttattcccaataccatttattaagtaatcttttgctatcgttttttcagttttctggggttttttgcttgtttttcagttttcttttcattatacaaagtgcttcagggtccagagtgcaacccgtaaagaaaattctattttctttttcatactgactgactcacagtacaatttctattaaggctggcaccatttctgttatgctttgggtctgggggtacatactgggttgcgtgatggtgtaggaggtgcaaaggctgccacccccttcccatggggccaggaggggctctgttcatgctcatttgcatttgagacaacttgacatttgagcataggccaagtagcttctctttcctctgcttccttgtacttattttgggatctcaaatgttagaaaacaggtaaaatagtaaaataaataaaaataaattttttgaggaagttattctttcttttcattatagttatttttaatgtgactattgaagtctctgtaattaaagctaataaacagttgtagtatgtgcatcttactttatatagcaagttatgtttctatctttaaccagacattttatattgtttgattaaaactttctagttggtaaattctatcatgagggcattcattcaattaataaaatccctgagtattttctgtgacaatttattctactcaaggatgtgaaagactcaaataaaggtaaggtctcatttcatcctagctttctggcatagtttagccagaatagacagtagcagaacatattctttgcaggggcgggaaacacctgtaaaacaaaatagaatgtgataaacgttaccataaagatacaaggaataggccgggtgtggtggctcatgcctgtaatcccagcactttgggaggccaaggcaggagatcacaaggtcaagagatcaagaccgtcctggctaacatggtgaaaccccgtatctctactaaaaataaaaaatttagctgggcgtggtggcacacacctgtagtcccagctacttgggagactgaggcaggagaatcgcttgaacccaagaggcagaggttgcagtgagccaagatggtgccactgcactccagcctggtgacaaagcaagacaccatctcaaaaaaaaaaaaaaaaatacaaggaatatctctagtatgtcgaagggagagagcaattccaaaagtttcaggtaaatgtcatagaagcaatgtcactggacaagcctttgaaatccatttggcattttaacatgtcaagataataacataaggacattccaaaaagtgtgagcttcatccaaaaaagggtgtggaaacaagatgattgttctgacaacaaactatcagaaggttgtaggaatggaaaccagaaaagagaattaatccctccaaatctcatactccatctgcctcaaaactcttgattttaacttccatttttatcttatgccactttgttcttccccattgccaggttacttccctaacccagagactaatcatctcattcttagatgattgaaatatgtggagcttgtggttctatgccttggtcttcacactgttcttatttcaccagaatattattatattaaggctctagagaaaaccctttggtggctcctttaatatctacaggatattgtcaaactgcattgatatgatgactaatgttcttcatggtctctctttattctattataattccacatacacatgttcatatgtattagtccattttcatactgctatgaagaaatacgggagactgggtaatttataaagaaaaagaggtttaatggactcacagttgcacatggctagggaggcctcacaatcatggaagaacgcaaaggaggagcaaaggcacatcttacatgggggcaggcaagagagtgtgtgcaggggaactgtcctttataaaaccatcagatctcacgagacttattcactaacaagagaatagcatgggaaaaacccacccccatgattcaattgcctcccactaggtccctcccatgacacgtgggaattatgagagctacaattcaagatgagatttggatggggaaacagccaaatcatataataatctaacttaaataactctttaccatgtgccctgagtttcggctattgcagaatactttcaattcccaacttttaccatggaatgtcacatccttatagtctcacttctttacacctgcaaatttcctccttaactttttcattcacctaacacatttaataatctttcaaaagcagttcaggtttgtcatcctctgtaaaaacttttgttgaccaaactaacccaaaagaatgactttctctacaatgcaatcatcttaccttatacttgaatctatccatgcactttttccatgatgttgcaatatttatctttatgtcacatggtctagtgtagacttggaaaagtatatagtaggttacggccatatttttctaatgttctctggcttatctgtccactacggcctgctaaccagaaagaatgatactgagctttctggtgggatgtgatagaacacatttttttagttagttacaaatctgttatttcatcgcttgggaacttagagacttatgagtaaatgtgcaataaaaaatagaacaaagagaaaaactcttcataaaaatgtgagaaaagcacagtggttataaaaacagaagggtcttccacaattctgggatcacttttcctgataacatttgtgaaaggctagttctataataccttatgtgcccaggcatagtcctattgggttttcaatgatttaggggtgtgggaaacattgttgctttcttgattactatttctaagcatggaaacatcaagagggttagcttgaagcaggcggggattataagggataggattatttgacaggttctttctcaatgtatttctctttaagaagactttagggaattatgcaaaaggccatcctatatatacccaaatgtctaaatattaaagggattctaggcaatagaagacctgagagttataaatcctactttaaaattttttatcaatttgaaatccttaagacttaatcaatacatcattttaccattatgtttgacagacaacttttacaatatagttgggagtatcctccaagtgttcattgttcctttctcccttgctagcatagcctgattttagtctggatggcaagtgtgcaaaggtaggcattttgccctaaggtggctcttcactcttgttcctaattaaccaactccttcccagctaggtggccatgtggtccagtgttctcaaagaaacacaatgggggcggagcgtggtggctcacacctttaatctcagcactgtgggaggccagggagggtgaatcacctgaagtcaggagttcgagaccagcctggccaacatggtgaaaccttgaaaaatacaaaaattagccaggcgtggtggcatgcacctgtcatcccagctacttgggagactgaggcaggagaatcacttgaacccagcaggtggaggttacagtgagccgagattgagccgctgcactccagcctgagtgaaagagcaagactctatctcaaaaaaaaaaaaaaagagagacataaggggaactcattggtaaagttcatgaactagtaagtggggctgattaacttgccctctttccctttgtctgtatcttcagaagccatgttatgaccaagaggcaaaaagaaggatgttttagtatggtggggcagaaaaaggaaaggagtgtgggtgtttagtgctttttatggagccactggatcaaccccactttctagtgatgtgagaacaaagccactgttggtagggtattctgtgatctgcagctacacacattccctccagacagaacacgctcagggattaagaagaaagtctttctgaagagttttctctctgtgccaatcctgcagaactcttatggaagataatctaaaaacaaggacttaactgatttttaaacagatagatttgaagaaggtcctttatagttatggcaaggcattagacagtaaaaaatgacagtaatcattcatgatatattcaaaacaacaatgtaacagtttcttcgattacctctgtaaattctgaaaagagaggtatttggggaataagttgtaaaaagaatgacccagaactttgagactaagaagactagtcctaagatcctatgtctttgctcagaaacaccaaatctatatgtttaacttaaaagtagcaaagcatggccatatttaatctatatagcttatagaggtaatctcaaaaagagagagttttgtttcttgttagaaaagtggagcttttggctggtaaatgtggtcagccagccttctaaaccatgaattgaaagcaattagttttcaagttacagactttttccccctgctcttgaaggctttgccttcaagttatttcatcttaaacagttttagcgccctgaactgatattttgataccctgataatttgtggtcttgctaaagactaactctttgcacagcctcctggacttgatttgttatttcaaacttccaattatttcacaccttcctttgagactttttctaattgggttgtattttcccaattcaaatcagaactcacccaacccttgccttaatcaaaatctgagcctctttttaaagattaaaattgtacagtgttgttaaatagatactgtttttacaatcttcgacatttcactttgtgggacaaactagaatttttaaatagtgggaaaatattttcttacccaatcatcaagccccatttttgcttgcataaagtcctcataaatagtttgggaaatatttatagcttttaaatgtttagcagacattgcgataattatctatgaaccagcaaatgaattttataatttgtgactaagagtatttccaacttcatcctttccccaggtaggaaaagtcatattactgccacacagcatatgaccaagcagctattcaaaaccaaattagtctaaaaaccaggtaccactttctcattagagagaaaataagaaggaaaagcttagctgttcttacaagaccagagcagctaaatgtcattccaagaaaaaaaggtcttgttttagtcccttgtagactgagaataaacgttttgagttactggaacttgatgggtgtgatttgccattattttccatttcctgaaaaatcttaagaaaaataaaatcacagctcatatgttccactgcctttccctaaactgttaggtgtttaagttgccttctaaaaacataccttaattttcatgtatatatctgtcaatgcatgtggatatttgcaagtataactgtttctgtaaatgtctgcacaatgaatcatgtttccagaacagaaaattgcttgggataatcagtaattccacatagtttatcaaatcccaattgagaagttttcaactaaacaaaattcaaaaacaggttcatatcttgaaggaaatggactcatgaagaataaattaatcattacattccttcttacataagagttatacctctccccttattttggggttcttagcctactagtatattgtctagaaaacaaaggccaaaggtttcaacaaaataaaggatgaaacaacctctagctaaccaaaataaatgtcgtgatgcttcgaatactttactctttgtagaatcccatgtctacacagtaccaagttgttcttgaggtgcacatccaaacacctttgttttaaagttacataacacatggaaggttagtggtaataattaggaaagggctaatttcataaaaagcttgcattgcaaaaagcaagagttgatagtcaataccctcaaacacaaaaaatgcagaaaagctaaacagttaaagaaaaaaaatcaaaacctctaacaaaaacattgaagtctagcaccacttaaagcagcaaaaacaaacctatacccttaatagtcatcatttgttttataagagtgcagaaatttggactaagagaaaaatattatattttttaacagattgcatttttcttttcttaaataagaaaataaggctaaataaaactggtgacttttccttggctggtaattatcacagatcaatgttatctaacagaaacaaatgcagatcacaaatgtgagctacacatgcatttttaattgcattagcctcattaaaaatggttttaaacaggtgaagttaattttaatatattttattcaaacaaaaatattataatttcaatacaatatacaagttattaatatggtagtttacattacttttattcaaattaagttgccaaaatcggatgtgtattttacacttacgtgttaattttgactatttatgtttcaaatgctcaatagccagctgtggctactagcaatggtattggacagggaagttctaaatgcagggaccaaagcggcaaacaaaacagacaaggtcccagttttcatagtttacattctacttcaggaaacatacagaaaactataaaaataacaaagagaaagaaaaatcatgtgattttaaaattgtatgaagaaagttaggttgatgagatagataacactgaggggtaagggtgctccgcagatgtggcattggtgagatctgaacacatggggaacagtcatgctatgaggaagaccatgctggatagaacagagagcttttacaataaacctaagataaaaataagcctgtgtgtccacgcaacagcagcagcaacaaaaggatagtgagatcatagcaaaaagagtagagagggagaatggtaaagatatggtcagggcacaggcagaggcagaggatataggactttggaaatcaggataaagagcctcacaagtggccagtggaggatggatcctggaaatgtcacgtgttcagttggaaacgttgtaagactatgccgcacaagtgagggcaacagggaaagagtcttcataaaacatgaaacgaagcctcaatgcctaactggatcaaggctatcttcctagatctattttctcacaactggaaaatcacatccactttgttggaattaatctagagcctctatgctttttaatgtaaaatgtccagcatttaacccaaaattatcagaaatgccaggaaatgtgaccaaatgaccataagaaaaaagaggaaaaaaaagactaaataagcattttggtaatccaggtttttgaatcgtcagattcctgctctataataactatgattagtatgttcaagagaatagatagtaagatgaagcatctaactggagagctgaaatataagaaaaatgaaccaagctttccttgaattgtagcaagaaaaaagcaataaaaatatacaattcaacagatgggttcaagagctgatgcaatacagcagaagtgaagattagtaaaataaaaagtagatcagcaaaaattgccagatcaaagtgcagagagaaaaataaaattacaagaaaaaagatattgaggagcgtagaagacatgtgggatacaaagcaaaatggtctaaatgaatgttactggagttccagaaggggaggaaaaagaatatggggttttaatgtgatttttattgtttcaatgcttcttttcatattctcatttttattacttaagaaatatatagaccagttcctcatatcaaatatgaaaataaattccagataggttcatgagtttaatgtagaaagtacactcacaaaataaccagaataaaaggagcaagcaaatatttttcttgccattacaataataaatgcaaaatctgaaaccattaagtaaaggttgctatatttatatacatatgaatttttgcttatgaaaaacaccataactaaagttcagaggctaagaccaaatgaggaaatagttgaaccaggtgtatgatggaaatatatacagtaattaaaatcatatttcacaaaaatatttaataacatggaaaatgctcgtaatttgtattgacatttaaaatagtttattagactatttcttccagtgagtttggaataacaaggactggatttaccctctcataataagcaacaataatatcagacaaaacatgtgagacaagcgttttagacactgaacaactggcctcacagcaccacaatccttgagatcaggaaaaagcacagtgagccctgaaatggtcccagcttactgcttgaaggtagtttccagactgcactgcagagagagggaacctatagagagccaatagtctcactgactgaagagaacagagaatacaaatcaaggtggccaaggaagtaatgagggagctggaaggaaagaaagagagaaagagaaagagagagagagagagaacgcactggtacagaggggtcccctcaagagtttgctaattatgaatctgtgcatatgtgagagaaaatgacaaatgccatagacaagagatattggaatagagtaggaagaaccattctcagagtccacacatagcagagaatagtacatgttcccataagccagagtagagagattcagggaattaaacagctattataaagatgatctgggccaggcacggtggctcacgcctgtaatcccagcactttgggaggccgagccgggcggatcaccaggttaagagatcgagaccatcctggctaacacggtgaaaccccgtctctactaaaaacacataaaaaactagctgggcgtagtggcgggcgcctgtagtcccagctacttgggaggctgaggcaggagaatgggatgaacccagcagacggagcttgcagtgagccgagatggcgccactgcactccagcctgagcgacagagtgagactctgtctccaaaacaaaacgaaacaaaacaaaagatgactctgtatattcaagaatgtaaaggaaacatatcattatgaggtaaaacatgtgaaatataaaaaggacccaaagggaactcctagagaatttaaaaaaaaaaatcgaaattaaaaatactttggatgaaaacgcatacctaggccccatatcttgtttctaatatcatacttcaataaaagaaactagggctccttggagaaatggctggttctatgactgagatagaaaatatacaagatgatcttggaatatttctttatggcagaaagtaaggaagtacaaaggaaaaaaagaaattgattggggtatgtcaaaggggcacaagaaccaactcaaagagttctcagtggccaaacctgaattaatgtgagtagtaaaataaatagtattgattatagcacaaaaaataaaatgaatatccatgagtccatactgatataaataaattattaaataaataaatatatggagtggggaaaataggcagatctcccaaaaacaaaaatttcaaataatttaggtagatagtccaccacaaggagggaaaataacctcactgcttaaatgtgggctgcacatagtgacattattctaaagaatacagtatggaaaagggaaaaaggaataattttatattggagcaacctatcaaatgctaccctagtaggatggtcaaagtcaacaccaacaacaataaattatgttgatagtatgtactcttgatatgatatgataaaaatgacactttgtctctgagggatttttccccaaaacccataaaccttaatgtaaatgatgagaacaagagttgacaaattctcataaggggaattctacaaaatatgtgaccagtactcttcaaaaccatcctggtactcaaaaacaagcaaagtctgacaatctctgatagccaagaggagcctgtaaatatataacaactaaatgtaatgtaatatcttcgatggcatcctagaacagaaaaaggacattaggtaaaaacagaaaatctgaataaagtatggacattggttaataataatatatcaacattggttattaattctagcagatgtaccctatgaatataagatggatgtttataatcagtaaaactagatttgtggtatatgagagctctgtatattatcttcacaaattttctgtatatctaaaactgttttttgtttttttgttgttgttgctgtttcttgtttgtttttgagacagagtttcacgctttttggagaggctagagtgcaatggcaccatctcggctcactgcaacctctgcctcctgggttcaagagattctcccacctcagcctccccagtagctgggactacaggcatgcgccaccacacctggctagtttttgtatttttagtagagatgcggttttaccatgttcaccaggctggtctcgaactcctgacctcaggtgatccgcccacctcagccttccaaagtgctgggattacaggcgtgagccactatgcccggcctaaagctgtttttaaaatagttaagtctatctctaaaatacatggggtggtattaatagcatattaaacaccgaaggttaaaaaagggaacttgaaaccatagcaacaaaaacaatccaatatcagacaggaaaaagacagaagtagtctcataaccatcaatggaatcccagaagagtaggaagggaattgaagggagagagacaaaaaaaaaatagttgaaagaataatggtcagttattctctaaatttgataaaaattataaacattcaaatccaaaaactcagtgaacctgtacgatcatgcaatggtacttcataatcaaattgctcaacaccagtgatgaagagaagactcttaaaggaatctatggtcaaaacgcacaacatgaagggaataaaagtaagaattgccataggtttcttggtcagaaactatgtatgccagaggacaatggagagacatctttaaaatactgaaagttaaaaaaaaaaaaaaaggcagtgaatataatgtttaataataaaggtgaaaaaaattaacaactatgctaatagcaaaaatattaaaatatttagggtatatacctaacaaaatgtaattgattagagaaactgaagaagacctaagtaaacaaataattattccaagtttacggtatgtactatggtctcagagtttatgctccctccaaatttatatgttaaaacctaatcaccaacatggtagtatcaggaggtagggcctgtggtaggacattaggtaatgaggacatccataaatgtcctcccaaacacactcagaaataatgtttaaccaaatatctgggcatctcttgacccactcaatttgacacataaggttaataatcaataactctatcctttgtcaatttggcatcccctgcacatagatctccctaaaccacacttaatctctaattaagacaataacatcattattctgcctaatatgatataactatccagtagacaaccagaaacacgctaacctcttcaccagaagagggggtaaagtctttgagtgatgtttacttttgatatcctatagcttaaattactatgatgtaaaattaacaatacgtaaatactatggtattaatagaacagataaaacaaacatgatcaccacaattgatgcagaaaagcatttgacagaatccaacactatttcatgacaaaaacactcagaaaactaggattagaagagatcttcctcaatatgatgaactttataaaaattccacaagtaatatcatactcaatagtgaagactgaaagatgtccttctaagaatcggaaacaaggcaagaatgcctgctttcagcaccactattccatggtgtattagaagttctagtcagagctattagtcaagaaaaagaaacaaaagcatctcaattgggggaaaaaagtaagattatgtctatttgtagatgacaaaaatctacataaagtccgataaatccacaaaaaaattctttaatatacacattactatacaccagtaatatgcaatccagaatgaatgaaaatttaaaaaaaaataaagatcagtggttgccaaggttcagggatgtgggagggaatttattgcaaattgatataagaaataatttggggtgatgaaaatgttcaatatcatgattatggtggtggttataaaaatgtgcatttagtaactctataaattatacattcaaaaattggtgggtttattgtatatacattatacctcaaaaagctgataaaaatagatttttaaatgtgtgtttaagaccctcctttaaaaatatttcaatgcacagagaaaagtatggaacaatggatagtataatatccaagaagtgggttatgactgacataactattttaatatgctttactttaaactgcttatcatgtatatacattagttttctaatcagaagaaaaatcctattaacatatgtaagagcattatgcactttacatttatttccatttaagagttaatattttaaagtatgtgcacttaccatgtgaaacagatcaacatttgacaatgacagatggaggtgttgcaatatgctgagctgacatcaagcactcaatgcccattttcacattatgtctcataaaagtttgtgtactagtactccatttttatatgggcacaactgaaaagattccaaaaacctagatcataactgaaaattcaaaggccatttccaataaaactgatgtgtttgactggtaatctggaaagctgtttgatcacccaggtccatctaaattttcagctgagtgaaacagtaacaagacagttttaaaggacctggtaaacaaacgtcaagtgacaaagactggagaagcataagttagtatggatgttaatgagcaaacctcatcttgtccttgtttcacacagaaaaacctactggtagaagaggaaaaggccgggattcctgaggacagaataaatgttagccatcaggaacgatgaaacttgaaagaatagaattacaaaactaagactagctcagacacagaccagactgaaattctagcagtggtaatctagttttggagaggccataggaaacacacctaacagattaagtaaaaagataaggaactgattaccccaggtgaagatagtggctgaagaataaatataggtagagttgagaagctcatggataaacgtacagactctcaatccatagtaaatggtttatgcaaatgtattctaattctaccatcatggacagtcctttggagaacttccttaagtatttggacaaaataaaactaaaaagaacttccatgggtacagtgttactatataacatgcactgtgtatatatacattatctctagtctaaattaaataccccaatttacctatgagtttgtgttagttgaaacaattggcagaaatctttatagtaagtaaatagagcaagtctcaaatttcaatctgttccagtgaaaatcccagactccttccagtctcatgcattcccccactccctccaacactcagctgagaaaacaggagtctgaccatttgacccagccatcccattactgggtatatacccaaaggactataaatcatgctgctataaagacacatgcacatgtatgtttattgcagcattattcacaatagcaaagacttggaaccaacccaaatgtccaacaatgatagactggattaagaaaatgtggcacatatacaccatggaatactatgcagccataaaaaatgatgagttcatgtcctttgtagggacatggatgaaattggaaatcatcattctcagtaaactatcgcaagaacaaaaaaccaaacacgcatattctcacttataggtgggaattgaccaatgagatcacatggacacaggaaggggaataccacactctggggactgttgtggggtcgggggaggggggagggatagcatcgggagatatacctaaggctaaatgacaagttagtgggtgcagcgcaccagcatggcacatgtatacgtatgtaactaacctgcacaatgtgcacatgtaccctaaaacttaaagtataatttaaaaaaaaaaaagaaagaagacaaaggggagcagagagtgcctgctatgtcccttgcatctaccacgtaaaacacactgattaaagtttgttctttagaatagccgccttcatgttcatggggcatagtcaaattccgttcacattcaagcaaggttgtccttccactaatttattaagtatgggtgcttctcctacctcccagagctggtaaaagatgatgagtcttccttattctaaatcagttttctttccataacgccaagtagaaaggaaaaagtaatgtcacctggcttaggatcagtctagctatgaccaacaggaataataattcctgttccacaaggtggtaagaattcagttacacaaacttttgaagtactcagcacgaggctgacacataataggtcatcaggttatggtatttattactaatgttgctttcatcccttagtgtctgataggacaatcaatgtgacagttgtttgagaagtccccatggagggtaactatcagagggacctggctcagtggacctgatactcctgctattcctatctcccactatgtcatatttcatcccagtagtgagcaattctttgggttctatcactaggtattagcttcaacatgataccttgtaaattcaactctcaggctctcttgcctttcctgcgtcatttaatgcctggaactatacctgcccaaatgcattatgctatctttaagagggaggaaagcagcaatatagctcaggcatgaattcatcatttatttttttcatcagtgtttaaaaaggagaagatgaagaagtagacctttctgcctgcactaaccctgcttgctcagaacagtcaatcacaattcttgccactaaaacatgggagttctcgtgtggtatgttcgtgtatgtgtgtgtgtgtgtgcacacgcgtatttttgagagagaaagtgagatgaagaaatgattgcctttttaccccaaacatagtttttcaagttcaatgtgtgatatatcagacctttcactttgagtttttaccggcagtggttctagaacaaccttctgaatagctactacttctgaattttaaaatcttcctggccctaccctgagccacattttaaaggtacgtcaacatgcacttggctcactcaatattcaggaactttattctttttaatataacttaattttattaatacaaaacagcatatcccagcactgccatagagataagactcatgctaatctatactgtgaagaaaaaggaacagacacagataagtacaaatttccaaagaaggacttcttggcctaagccaaagtttgtttcacctccttttactcttgaggaacttttaattgctaggcgaaatgaaccgactgaaatgaatgtctaaaggtttcataacctcctcaataaaatcgaacatgtttaatcaatctcatagaagacccctgaggtatgtcaatcacatttcctgtgggacttacctacctggcatcattagatcctataaaataatagcagatattaccctctgcaaacacacatccttttcatttaccactgagatctcagcataggaatgttttacataaaagaatttcttggagattgagaccatcctggctaacacggtgaaaccccgtctctactaaacacacaaaaattagccgggtgtggtggcgggtgcctgtcatcccagctacttgggaggctgaggcaggagaatggtgtgaacccgggagacagagcttgcagtgagtcgagatggtgccactgcactccagcctgggcgacagagcaggactccgtctcataaataaatagaatttctttagtgtcatgacctagtacacaggaaatgcacattccagggcagaaagcgatatttattttttcaaacaccattccagccaactgccataaacttagttattctgaggtctccttgtccactttatttggagtctgccaacaggtgactagattctagagtgcatttatctaccctccactgggtccttctaatgcaaccaggattcctcaaggaaaaccctcagtctagaatcagcagccccttccagagcctcctctgacattcacaccaggaagtaatgttccaagatggtctcagaattgtattgaccacaatgggtcagcaggaagcttactaaaaagaaagaaaactcaataagcatcaggcattctgcatcaagcaaactaaagttgtaatgcagtcacctaaggtcacccaatcctctgagatttaaggaaaattggcgtgagcccttattccacatcctgtgagacatgcctagctttcccccaagatttttgcaaaataccggagagtctcatgttctcatagtcatgtctggctgcaaattatttgtcttgctgaattttctcctcacagttcattttgcttgtgtctcacctcttgtgggtattttctttctcctgctccagacatggaaatcaattgttttcttcttcctcccaaagcatgacattttgggggtaaatagattactgtgaaggttttggatgtgagggaggttatagcacaaacattcataattaaaagctgtagacattaataatcattttttttttttggagatagagtctcgctctgttgcccaggctggagtgcagtggtgcaatcacagctcactgcagccttgacctcctgtgctcgagtgatcctcctgcctcagcctcctgggtatatgggactacaggtgtgcaccaccacacctggttaattttaaaaataaattggaagatgggggtctctctatgttgcccaggctgctctcaaactcctgatctcaagcaattctgctacctttatatctcaaagttttggaattacaggtatcagctactgcacccgaccccaaatctattttttaactgattttattccttccaaaatctccaaggaaacctgatttcctggagacagtgctgtggtttttaaaatccccctttaataataattacactgagatgtttctgcacttcaagatgatgacacagcttcaataataagggcctctcagtccctgtccttccaccacccttatgaggtatctcctggaaaaccatggccaggaccaaggcagtcataatcaacaatgcagagagatctggagaccaaaagatatttagaggatgatgaaagtggggtgtggagtggtgacttcaggaatctagagataagccaatgaagccagcggttatctgatcaacaatattgtccctgatttgagattaagttaaaaacaagatacaggccgggcgcggtggctcacgcctgtaatcccagcactttgggaggccgaggcgggcggatcacgaggtcaggagatcaagaccatcccggctaaaacggtgaaaccccgtctctactaaaaatacaaaaaattagccgggcgtagtggcgggcgcctgtagtcccagctacttgggaggctgaggcaggagaatggcgtgaacccgggaggcggagcttgcagtgagccgagatcccgccactgcactccagcctgggtgacagagcgagactccgtctcaaaaaaaaaaaaaaaaaaaaaacaaacaagatacaaaggaacgtgactaggaacacctgattttttgttcccagtcaacggcaggacaaaaattcaaaaaataaaataccaagcacaagtggtctgtatcccatatggtattcagttaatttttgtagcacagatcaaatcctctaattccagaatttgtgcctaaaatggcagctacaatcataatattagtttctgcagcacacaggtcgaggatgaccacagttctttccttagacctgcctctcccaagttatacttcagttcctaaatgtcactttgaatatttgcccaagaggccttcctgtgtcatgcataatatatgacaaatttggacaaatctaaggctcctctttgagtttatctaccatagaaaatacctgcattgattattaggccaaatgagataaaagaacttgattcattcaggattctctggcaaggaagagattagggtagcagggctgacctgatttataccccatcccctgatttgcaggggatgaaactggagaaggacaggatacccctttaccctagaaaaaggaactgtcctggcaggctcatcatattggagcaggcagcagaagacagaaagggaaagtggtatctttttcagacacagggactatctcctgtatcattttttaacactgtttttgtggctcttactccagcattaaacacacagtaaaaactgaaaaataaattttaaatgaagttgagaaaatatagatgtagtaaaagccctataaactttgtactggaagttccagaaatgtcactgtttataagacattttcattgatgtagttccttttttttttatttccaatctttcaatttctttttttttattattattattaaagttctagggtacatgtgcacaacgtgcaggtttattacataggtatccatgtgccatgttggtgtgctgcacccattaactcatcatttacattaggtatatctcctaatgctatccctccccccttctcccaccccgtgaccccatgacaggccccgaggtgtgatgttccccttcctgtgtccaagtgttctcattgttcaattcccacctatgagtgagaacatgtggtgtttggttttttgtccttgggatagtttgctcagaatgatggtttccagcttcatccatgtccctacaaaggacatgaactcatcttttttatggctgcatagtattccatggtgtatatgtgccacattttcttaatccagtctatcattgatggacatttgggttagttccaagtctttgctattgtgaatagtgccgcaataaacatacatgtgcacgtgtctttatagcagcataatttataatcctctggatatatacccagtaatgggatggctgggtcaaatggtatttctagttctagatacttgagaaatcgccacgctgtcttccacgttgatgtatctcctttggagcttcccaacagtgctgtgaggtggggaggtactatttactttatacccattgtcgcccatggaaatttagatgaatgagttcattcctgcaggcccaaggactagacctcctcaagtttcttttgttctctcaaaacatgtatagttaactagattaaattttaatttgcataaagcctatgctattctgttttctccatatgactattaaatttcattttacccaaggcttctttttataaaccacatcatgcataaatcatgtctctgactctatgtaagagagaagctatcataaagatcactggaatgaagtctcatagaaaaccaccaccattgaaactcagtatttccctgaaactgtcactgttcccttcgaccatgtctttacttgtaataggatggaaatgtgttataatctggtgcacagccttaaattgtcctgacttttccaacagcacctctggttcccagaaagaccctccttcctctgatatcaagtcctgcaatcccacaatcaggccaggaatggtaggtctatcaaagcaaaaaggattttgtaacaaaattaattacaaaacagacatattttccttttttggtcatttttttggaagttggcagtgcttaactctcgccttcagggtctatcaagaactgaaatcttgattttatctcgaatagttatgtaactttgagtagggcagtcttcctgtgtgttgagtctctcatctataaaatgatgagtttagactacttaatatctaaatgaccctactcttctgatcaaaacttgggagatggttgctattactgtgttctgggagggcaccaagaaaagagtatcccagctagactcatccaggaaggcttcatggaagaaataggaatggtggtggactttggagaattggaaggcttttaacagtgcaaagacattccagacagagggacaaggtaagcacaggcttcaggaaaggaaatacactgcgccctcctggaattgcagggagtgctgcatgcctgctgtttgcagaaggacttttccataggcctattctctttcatattttttttttaaaatgaaattttattttaaagcaaataaacatcaaatttttttgtcacaactgtcttgaattataattcacataacatacacttcaattatacacagtcaaagcatacaattcgagagttttgagtattcggttgatgtaaaagtaattgtggttttacattacttttgcaccaacctagtatgttaacagatatactgcaatcacattcagttttagaacatatttatcatcccaaaggaaatcccaaatcttttaatcactactccaaaattcccccatccccttcctcatccctaagcaacaactaatcaactttctctctataatctactctctatctctattctatctatagatctgccctttctggacatttcatataaatggaatcatactatatgggttgtgaccagcttctttcacttagtaaaatatttttaaaattcatctatgctatattatgtatcagaactccattcattttattgttaatattccatggtatgaatgtacattatgtttacctattcatcagttgattaacatttctggtgcttaatgttgttaaatatttatgtacaagtgttcatgtggacatatgtttttatttctcttggttatgtacctggggtggaattgctgagttgtatggtaactctgtgtttaacattttgagaaactgccagactattatccaaaatggctgcaccatttcacatttccatcagcagaatatgagagtttcaatttctctgcatcctcaaccacatttctcattatctgccttttgattatgacagtcctagtgaataacttactgtggcttggatttgcattttcttggtgactaatgatatcacacatcatttcatgtttaaattcatttatgttctaattaaatatgtatatattaaattcattcatattctgattaaatatttgtatttttattttgcaaaaatattcagatcatttgcccattttaattgcgttgtcttttaatcattttgttgtaggaattctttatatactccaggccaggaatgtccaaaattttggcttcccctgggccacatcatagaagaattgtcttgggccacccataaaatacactaacactaataatagctgatgagctaaaaaaaaaaaaaaaaatcgcaaaaaaaaatcaccaaaaaaatctcataatgtttatgaatttctattgggccacattcaaagctgtcttgggtcacatgttggacaagcttgccctaggtaaaagtactgcattagatatatgatttccaagtattttctcccattcagaaaaaaagtcaggttattagcattatcacatttgaaagaacagaaaagaacaaaaaagtcttccagaacaagattacaaatactgcactattttctgcaaaacacaatttaatttttatatagcaaacagcaaatatgttaaactctacttttaaaattcattaaagtcacccccaaagttggtaggttaaaaaaaaaaaaaagcacacaagaacacgtagacatagatgcctctacagagaagaactgttgattactccagtaagactattgtagcttttataaatcatgttttaccaattcacatgctagaattacatcacaaaataagccatggaatgcatctggccacatgttgtaaccattaaaatgatgtttcatgctacagagcatgtgttagaggtactctctacatgaagtctgactagatagttcaaaatctcttatgattgaccaattagttgcttccaaagaaagaacaccacaaacccagaagatatgtaaacactggctcattagggcaagacattttcttgttagactgaggtctccgttgtgtgctgaatggtaaaacataattcactgttcattttgctatgaacaccaaaagatttcatttctgagaatacacccacgcagagaaaggtgatttcagaacagagctcaggaaacataatcctttatatgaagtgaattcagagtcaggcagagagcttgctctctgcttgtgtccacttcatcttctgctctgaaaactccagctgggctccttgctccagtgttaccttaaacattctctttcctggagcaatgtacgctgaagtgcatctaaaatagctgaatccttctccagtgagctgagccacaggccttgcacggaaagacctgggaaacattagctagcttctggtctggccataatgaaaataaatgagggcttcaatttaaagtcgttactaaaaatttgttctttcctccattctaattctgagacccacttgcagctaattagaatggttcccagcgtgatctcccagcacactgctagtgtaaacaccaaccatctgagtttcattacaataaagaaatcaaataaacagtggaccagaaaacagtagtttgggcatggctcattacagcacaatgcagttaacattcctcacttgggaaggaaaagaaggcattgggcaagaggggctgatgtccagtgctttccattcttattaacgatattagttggactggggattattttttactattaacgagttttggagaatgaggagggatttttttcaatggaaaagaaaaagaaatgccctctgaaccttggtgtaaacaaagagaaaaggtaattattggctctgggctactcactgcttctccagtttctcataggatgtactgttgacaatttacataaggaaaaagaaaaagaaaaaaagaggaatacagtatccattaatctactcaagggtttttattatttatcctaggtacaaacaaatctttgccaatgtaggatcggtatgactatatgattgctaatatacagaattttttcaaaagtaaaaacttacctaagagagtcactcttttatttagaaattttacttatctcattcacactaataattggaagtattcatgtaaagaatcattctgtaggttgtctatattgtttagcatgatcttggaaccatcaaaggaagaaagatccaaatatttctgtctctaaaatttaaccctgcttttaagtaattattgaaatctaaagacatttattgaatttggttcagaaactcaacaaaagaatgagttctttggtaaaagcatgttctaagaagaaaatattaaccaactacaaggcctcatgtgatattacttgtgtgcctgtgactcagaattcataattggaccttggatcaggtcaggatttcattgcacatgatagaaattgcttagcccctcagttataatgcagcttcagtgaagaacatgtagacatactcatttcctctttgaggcagtctaggtctaggtgtgtaaatatcacgtcactggtgcttaaaattttaaattgttagagaaagattataatacttagcagaacatattcactcagaagtttccaaatgctttgggctaagattaaaatactcgcaaaacagcccctttatgcttctgttttgaccactctgaaaacctgttgcataaaaggacccaaagcaagatcctaaactgtataaatcaataattgaaaaaaagtcacaaaaactgcaaatggtattgaaactgatcatcttagagaaaaagaacaaaataaatgcatgctctgaccttgagattcattttaatttgtggaaggaaacaatcactcatccctgagcagagaaaaaaaataaaaataaaaaggagaagaaaaaagaaaggaaaagaaacagggaagcatttgtctgccacagctgtctcagtaaggaacttaaagaaaaaaaaagccagctttcttagaacaatttaatgtattgttttggaattaattgtctattatcaacatgttgaaagaaagttaaactcaaggaaaatgaaagtgaatttccaaagaaattaaaactgaagatagcaatttttaaaatctcaaagagccatcatttcaattttcctaatctgcttagtcttaaaacaatctattaggttggtacaaaagtaatggtaaagaacacaattactttcgcaccaacctaatacttttgtacaaaagacatatacttggtgtcattcaacaagtatttattgaacatttctctgctagatgccaatctatttactgatttttaaagtgaaatttgtgcactctgatgtccatagctgtaaaataagaggtttcgattggatagttgagagggctgccaagttcttaaagtttagagctattatttcaccatcaggcgatgtaccatgtcttaagctctgcaatccagccatggtcctttacctggtcaaaattctccatgacagagcatggaagagaacactgctatcatcagaactgaccagcctcctgtaaagccatgagttttaaggattgtagtgtttaacggagttgaatgaggaggctttaccattcctttagaaattatctttgcatatgtattactcacgactagaataatgttggaaaaataatgtaatcgttttataaatgcccccaaaatgactatcactatcacctttcattttcctttacagtaggtaatttttttctaaagcattttcattgttaatttctcataacagaatgacttacgtaaaactcatggagcccaagtgtggcttataaaattgtaatggaatattaaagtgagcaaactgaaatgaactgtttaaattattttgttatttcccataccaatgtcctgtattgtgcaaggaccttacatgcattattttattttgtctttatagccatgctatgggatccacactttaacaaatgatgctgatgagaaaacagagatcattttctcagagctgagaagtgaaggaactaggatttgaaactgggtttactcatacaaaagccatgctctttctacaaccttgtgggtttttatttttatgcataaagtacatacttggccacaaagtagattttagaaaataagcatacttaaaataaaaggtatgatgtaaagagcatagagttctgaggtgtagtgaccctcattagaacatgcatcaaagcttgcgtattctagcaaataaaacagaaaaataataatgcttaaccccagaaaactaaaatattgaactctataggtaaaatttatttttaaagaattttgggttgcttttcctctgccacatggtatgctgatggaacatagatcccagcatgatagattactcagaaactgaaatagtctaaagaaagcataacccaacataaaacatttatggagaaaacaaaaggaatgaataactgattcccaaatggttctctatttggaattattcatactgtctgtaagatcatcactgaggaaaactgaaaaggagatatgacattatgataaaatgagcatggaaagggcacaagaagactgtttttcacatgtgctctgccactgaccagttgtctgagtttaggtataataagtcatttctaccttctactactttacatctgttaaactaagagtgtgctctcagatttcccctccagctccgatgctctcttagcctacaaagcattaataaaaaagaatctcagtgtgattgatcgtgactttaacatagaaattactcttcttctggtggatgggaaattctctgtctcttcaaatcacatctattattgcaaaactcaaaataaatgttcagaagttccatcaaggcagaaaagcaaccgatgctatcagaagtttacagtgctgagtttaaaagaatgtgaatatatgtgtgtgtgtgtattcatgtgtttagtgtgggtgcatgtgtgtgtgtccagagaaggtcacgagtttgaccttctggaatcagcaaaggttccatccacggaacccgctgtgacggcatctggaaattcctcacttgggtcagtggggagacattctctgtttacattgcttttgttttatacccatgtggtgttcaacatatcaataatatatttcaatctcatcatgaaaccctttaatgatttacttttcaaacctcccaggtccatttagccacaggaaaacctactccttttgttacaagctgaaactatgacagtcaaaacacagacagaagaaaaagcacttgctggaatctgctgttgttcctgctgtttgccggcagttgccatagtggagctttcgatgtttagagagcacatgaggaaggccactaatgtcctgtaataactttttctagaagtgacacatgtcaaaatgcacagtttttgcacgattggcaatattcatagaagcattttctgtgaaactgattatagcaatcattgattctggaatactttagtgctttactcctaaaaatgttatagaccttttcatatatatcatattctcctgtgcagatcacaccaaaagttcacttagttctgcaccatcatcagaaattctccaagttatatggagtgtgttactgatgttttgttctgctcaacatacagctttgtagtgacagtggccactcaacgaggcaacaagacaattctcggggaatgaaactacccacctctccagacacccaagccaaaacttttagcattatatttgtctcatccttcccactcaccaactggttctagtttatttccacctctgtttactctcccacctaaaatttctcacatcaatgcatttctgtctccatcacagccattgctgtccccagaacactaacctctgtagcctagattcaaaatgtctgctatatatgctcctatactctcccatatagctttatttttctacaatgggatggagtaattctatttaaatgtgatctaattgtgtcatgcgcatttgtgagcccctcagagattccctttgttcacctagatgctcaataaatagtatgtattgtctcaatgactttaattgaataaacagtgttcccgcaaaggtatttatgcacaaaacaaaacattagtaagacattcatatacatttggaagaaaatagggtaagcaaagttgagcaaaagaagaaactttattttttacaagtcaactaacatttatttgataaatataaaagagacaatataacatctatccttagttgcaagttacaagtagaagacagtgtggctattcctcaaggatccagagccagaaataccatttgacccagcaatcccattactgggtatatacccaaaggaatataaatcattctactatgaagacacacgtacacgtatgtttactgcagcactatttacaatagcaaagacttggaaccaacccaaacgcccatcaatgatagactggataaagaaacatttattaacacattatgcacctggtgattgatatacatggtctcctttgtgatccctctttttgtgtgtcatgggaacctttcaatataggtttaattactctcactttacaaacaagaaaaccaaggtgcagagagactaagtgtattgcttatacagttacacaggtaataaaaaccagggccagggtgtctgtctagttccagtgttttactctgttctcagtcccatgcactagatgagttagtcttgccctcattccttcttgtgatgaacttcctctccatagtgaattatctccttatttctttagtaattttctgctctcttaatgtctctcctgagttaaaaaggaaaaaggagtttgcaccagtcatctcttgcctacacgtgcctatttccacaaagtcatctcccattcatttctcaaatctctaataaaactcggctccatccctttcacaatcactttctactacggtctccaatgacatccatgtcacagaatcaaatgtccttttcagcctctcctgctataacttcttaagagcaaatcataccgtcgactactttctttaaattaaacattatcttttcccagaagctcctaattttctttctttcacccttttctccatgtctcaattatctcataggctcatcttcttcaacagaagcttttagttccttgttaatattcaaaagtctatcctaggctctttcttttttctccctacactctctccataagaaatttgatccactgttgaacaatcatagacatttaggtaattcttgacaccttccttttcttcatctcccccatacccattttattacatactcccgcaggtttgaacttctatatcttcataatccattgacttaattctatttttatcaatcttgtacttttagttattggagaagatggaatcaatacaaaaataatattgatatatatattcctttgttccctagagaggaaaaaggtcagatctggaccttctgtggtgatcctgggccagtggctttgaaatgtttctcaatggattcctctctttatgaaactcctcctccaacaacatgtatctaatctcccctccataaaaagtcccctaaactgtcccttccatctctggccagtcaaaacatgaagtaaaatagatactctatggacagaagcctggagaaattcagtgacgctatttgcttgggaaaatcctgtagcataagaccagtcatagagattgtgctaagtgtatatttctctggaggttggtaagcatttcctgtttgggcttttaatagagatggggtaggaaaacctcacccctccctcaggcgagaaggcaatctgacctaatgtgcattaggtttaatacacagtcctgtggttgccttcagcattcctattcttatagcacatactcaagtgttcccaatgtcagaataaagtagaacaggcaaagatcaataagtagcatcaggtcaaaaatgaaattacaatgatgtcagaaaaagaagacagaggagctgggacttctgaaagagcagtagaaaaagctagcagactctctcctcagagaaataacttttaactggtgaaaattatttttaatgtaatgtctctaaaagtaaacatttgatttaaaaactttaataaatctcagtaaaaacaataagagtcatgtgtgcatttgagtcatgaactccctccccacaactccaaattttagtgtgataggagcctactctgcattgatgaccataaagttaggacttcctttccccctttagctccagtctatgattaaagttttaccccaggagagacaggctattggcatctctcatatgcccccagcaccatgtttcagaatgattccaggcagaaagggttgaaagaactggagaacaatgggtagaaattgtactctagattttgcagactaagaatagtgggctctcattgtccccaccacagcttgctcataaagcaaaggtttcacagaggaaggggcaagctgagaagatcaggagctaccatacctgaccagtgctccaataataatgaaggagtgtcacttctgaagaagtgtgatgctgtcctttttaccaactccagagcagttgtgcagtttttgctcaaggggataggcagtccataagaacggagagctctgaaactcttcctaagggcattgagtttatatgcaactgactatggggaaactcgcaatagacatactagtaatgagcaatagagaggacactgatagcttcatgataggagtaagtgaaacagtagaccactagaaggcttggagttggggcaaacatcaaagtctagcaacaccctaacttgaaaaagatgcctgaatttaattggatcggactgtggaacaatttaagtcacagagttttggtgaaaacaatacagcaatcaatttgcaaatagtgaattataatagctgaatataacatcaatagacataccagcaagaagcttaagaggaaggctgggaaaaggaataggcaaagaaagcttgggtagaatcacacttatctctgttggtcagaaagattgcacgtatgcccaaagctgcactctctgtggagtgacaccagaggcattatgctgtggatgaaatttactttccgcaactgttctagctaagtccataaacaaagaaacaagcaaacaagaacaacaagtccatggggacaaggtgaggtttggtatccaaaaggtccatttcaacaaaagaaactacaagacatgtaaagaaaacatctgatgcatacacggaaaataaaagtgaataattgaaactatatatatatgtgggcccagatgttagacttggcagacaaagactttcatgctattatcataaatacattccaaaaaccacagggaaccatgtttaaacatgtaaaggaaggttttatgagaatggcttataaaatagaaaacatcaacaagtataaattgttttttaaaagaactaaattagaattatgtcattgaaaagtacaataaccaaaataaaaaatttactgcagacaatcagcagtgtagggctaaagtttttaccccatgagagataggctactagcatggctcatatgtctccagcaccattttagctggcagaagaaaaataaataaataaataaaacagcaaatgtaaagttagattaagagagattacataatcagaagaacagaaagaaaaatatgaagaaaaatcaataaagcctcaaaacatgaaatgggagtaccaaataaagagtagagagagaaacaaaaatattttcttagaaatactgactaaaaactccccagatttgatgaaaatcattaatctgaaaattaggaatctcaatgaactccaagtagaatcattaccaaagactaccactcttagacacattatatatgtatatgtagtcacattatatatacacaccttatatatacacccacacacccacacacacaaaactcaataaataacagctgacttctcatcaaaaaacatgaaggccagaggcactggaatcgtatattcaaagtactggtagggaggggaatgccaactaagaatattctatacagtaaagacatcattcaaacaagaaagtaaaataaagacagttcaacagaaacaaaaactgagaaattttttcttgtaggtctgcattataaaaaatattaaaagaaattattcaggctgaaagcaagtaacacacaaaagtaatctgattctacatggaaaaaataaagagcttcagtagtgctaattatatgggtaattatgaaaaacaatattattgtatatttcctcttttttgttatcatacctggatttaaaaagcaattgcattatataatatgcatgtaagtgtgttgggactataatatagagaagtgtagcatatcagacaataatagcataaaggaggtgaataggagcaaagccctactggagtaagaaaatgataccacatgataaattaaatccacagaagaaaaataaagagaaccagaaatggtaaataaaatggttcctacaacaaacttcataaatacatacttgctctcctttcttctctcaacttctctaaaagacatataacaatatactgaataacacacacacacacacacacacacacatagtgtattacaataacagcacagaagaaataattatatggagatatccagctatataggagtaaagtttctgtatctcactggaattgaattactataagtctgaagtaaattctgatacattaagacatatattgtaaaccctagaccaaccacaaagcaagtaaatttttgaatagtattaaaattattaaaggaattaaaatttttactggaaattttccacttgctgcaaaaggaacaggtaaaggagaaacaaaggaacacaaaattctgaagatatgtagaaaacaaaaatttaaatggcagaacaaacaaaaatttaaatggcagaactaaagttcatcacttcattaatatcattaaacatgaatagactgaacaatctaatcaaaaggcaaagattatcacactggggaatacaacaataataaaatccaagtatatgctgtctatggaagacatactttggattcaaagatgtaagtaaaatcatgaaaataaaatatatcatgccaatagcaaccataagagagctgaagtgatacgctaatatgtactaatatacaaatattaggctaagtataattttaaaataaaaatgttactagctatgaagagagacaatttatagtgatagaaggatcaatgtatcaggaagacataacacttataaacatatattcaccaacaacagagccaccaaaatgcataaagcaaacaatgacggcattgaagggagaatagacaattcgacatgattagagacttcagtatgtactttcaataatgggtaaaacaactagacagaagataatgtcattgaagacctaaacgacaccctaaaacaaatagacttaagagatctaatagaacctttcactcaaaaacagcagacacacattcttttcaagtacgtacagaatattctccatatgctaggccataaaacaatcttcaataaattttacgagattgaaatcatacagaatatgttatctaactacatacaattagattagaaattaacaacaaatggaagtttgggaaatttacaaataggtaaatacacattcataaataaccaatgtttcaaagaagtagttattagaaaaattagaacatcctttgagatgaatgaagacaaaaatacaacataacttacaggtttaagttaaagctgtgcttggggggaaatttatgtctgtaagttcctatattaaaaaaaaattagggctcaagccagtaacctaaccttccactttaggtaactggaaaaacaagaacaaactaaacccaaagaatcagaaaaaaggaaataataaagaatagaacagaaataaatgaaattaaacatagaacaattataaagtcaacaaagactaaagttgattctttgaaaagatcaacaaaattgacaaaacttaacctagactgatcacatgaaaaagagagaaaactcaaaatactaaatttttttttattggagataaaacatgaagcctgtggatgtgtaagcagataatcttgaaaaatccagacagacagggaaatctgtgaatagattgaggtccctccccatcagcactgcaggaaagagcactggcaatttgaaaaccaatttatggagactctacaggttctgaggcaggaaacaaggagaacttaaacatggaaaccgaactagaaattggtctaccagatctggcaccacagaaagagctgtttcagaacaaagcctgaagtagtcatcagaaaaaattcacaagttccgagccagacaagctacagagaggacatgatgccaatacttcaaatattaagctggagcttctttaatccctaatgcaaagatcaggactggtactaaaaacttgtgcaattgtcatgtgggttaagtcacctctactgttaggaaaaagcattttctggattctgggaggtgtgaccttgtaaactgaaatctaccccagtttctcacattcttatttatttataaggaggcaatttcagtgtaattaattataaaacagaagtacatatggatcaatgctttttacaaacagaaaggtgtgtgtgtattcaaaactatatatataatttaatttttctcaagacaaagatatatctcattcagttttatacccataagttttggggtttttttaagatctcagaaaaagtgaagaatttaagaagttacaatctgggatatgagatttttacccaaaatgcaatattacattctgtcactaggtcagtggttcgcaaacaaatttgaactacaaatttgtcagggaattttttgtttctgtttttcatttttaatacagactcctacctcttgatgagagcaagcatttgttgagtccttcctatgtaatgggcaagtgccagtgttctctttatgctacagagtaacctgcgtatacagagtaagctggggaagctggggaagccggagccgtgaaattaaataacaccataaagttacctagctagtaatgggagagctggaatccacacacaggcagtctggctccagaactgagcaccatattaaaatacgcatcaatatttcagggaaagtgctcagagtgttgtatgtttttaaagccatagaagagactcatctgtgcttgagaaccactgccctggcacttttctgtttgaaagtgtacttacaaacaggctgtggttcctccaacatctgtgctaatattgcattaagtgttaagtattcaggaaaaagcctgttcttgcttcttctttaattgttttagagaattcctacatagcttaacaaacatgttactttgataataaagtacatgaatgtgtcttgaatataccttacttcaataataggtaataataccaataatgatgtctacagcttagtgtaagacattgggctgagttttgaaatttactatctctaagtcttgcaacattatcatcattataaaatgatagaaatagaggctctaaaaggtccaaggtgcaaatccaaatcctggatttgaactcagctatatcgatttcaaagttattgacctttccaagaagcctcagaggcttcatacattgtacttttaagagggagcatattcgaagtctgtaactggacctgttttaaattctgtcctttgttggttctttctatggttcaagacagttaaagtccttttggcaatcatgattttttttgaagtccctgcagtttctggaaaagatagatgaaaacaatcttgctccccataaggtttctggggtaggagagagaggattaacacaatcagagtctggaagaaaacgaagaagagattagctggatgctgaatcaagtagctataaagaatagtagcagtgttggatgacaaagtgctgatagcttttatattttcaactatcagcatagattattctagcaaatgacaataaagaaagaaacttccttgacttaacaattgtgtgaccccttgggtcatatatgaaaatactcaagtaaatagaaacatatgaacatttagtgtgaaaatcagtggctacatacaaatttttagcctccaactcagtcactgacactccttagctgaccttgggcaacttatggagcttctgtggacctcagaccctcaagttatctattatgaatgcattaatatattctatgtcccttattcccaggtctaaataaagatgtatatccaaattaaatgtcacaacacatcaagtacccaagaaccttaaattcctggaaaccagataagccacatagtgatgtgagggaagtatctacatttgcagaagtccataaagaccaccttgacttgtgttccagaagtcacattaggcagtccatccctcatttgttaatcagaagagatgttaagccaagattttcctatatttttattaatttttgatcagaggagagaactaaactaggattttctttagtaccttcttacagatcttgataagatgtttcagacatcaacaggaaaagactagaagaaatacaaaatttctctcttgaatgttgcacaactgaaacttgtataccttgctttgggagtgtaaattggtacaactgctttggaataccatttagtcttattcaaggaggctaaacatatgcttagtctatgatcctatgtcctagcaatgttccatttcttgatctgggtgttgtttacatggctgtgctcagtttaaaacaaatttttgaggttatacttacattttgagcaagtgtctatatatttgctatacatcgtaaaatacattttttaacactgtcttatcctaacactgcaagctttgaatagctggctggggagcattagcggacaatgatgtttaaatgcatcatctcacatgattattatgtaactgtatgttatgagctgaattgcttcccccaaaaaacatatgtagaaatcctaagcccccatacctgtgaatatgaccttattcagaaatagggtttaactgagataatcaagtgaaaatgaggtcacactgaattacggcctgccctaattcagtccttataagaattcattccttaaaagaatttagtcagatgtccttataagaagataagagatggctgggcgctgtggctcacacctgtaatcccggcactttgggaggctgaggcgggcggatcacgaggtcagatcaagaccatcctggctaacacggtgaaactccgtctctactaaaaatacaaaaattagccaggcatggtggcgagcacctgtagtcccagctactcaggaggctgaggcaggagaacctgggaggcggagctttcagtgagcccagaccgcaccactgcactccagcctgggcgacagagcaagactccatctcaaaaaaaaaaaagaagaagaagaagagaagagatgtggacaaagaggaaaaacactgaaacagagatgggaactggagtgatccctctacaagctgaggaacaccaaggattactggcaacaccaggaactaagaaaagagaatggaacaatttattccccacagccttcagagaaagtgtggcttggccatgccaacaccttgattttgaatgtatagcctccagaattaagagaatgaatttctgttgttttaagccacatagtttgtggtaatttcttacagcacctctaggaaactagtacaccctacaagataggtgttgttatccccgttttaaaagtgatgtaaccaaggatcaaacaagttaagtcacttggccaagatgacacatctagagagtgttcaagctgatacacaaaagccagatgtgttctgatttcaattaggggttggtaggccaggcgcagtggctcacacctgtaatcccagtactttgggaggccaaggcaggcagatcacctgaggtcaggagttcaagaccagccaggccaacatggtgaaaccttgtctccactaaaaatgcaaaaaaaagctaggtgtggtggcaggtgcctgtaatcccagctactcaggaggctgaggcaggagaatcacttgaatccaggaggcgcaggttgcagtgagcagacaatgcaccatggcactccagcctgggaaacgaagtgagactctgtctccaaaaaaataaaacatatataaatataaataaattaggggttggtggccacatcactaagccagctgccagcaaactccctccaacaaccatccttctgcatcatgcttgctgccaggagttttttgcctctatccctaagtctttgaactagttgtgaagtgattgttggttattgaaaacagttaatgatgtttaagttcacttagaaggccatcttcttttgccactcactatatgcccttctatcttatagcaatcaatcaaagcaaatccactgtccccagatacttttcatgaagacaattttgctcctagtttccagaacataaaaccagggtaatcctgcatgcccatctcacatccctgaacacggtgatgaattcataaatgggcacataccccaatcaggccaatcaagggcagcaaaattttcaaagcctttgattgacgtttcatagctttccgttctctcagtaaccttacaagagtgaagatacagctccagagtgagaaagaactggcaaaaatagaaagcgaagactctcgtcaataccacatgcctaagccctgaattcaatcggagttaaagccaaacttatggtagacatttcaacttacaaaagccagtaaactaccttttgtttcaaagaccatttattacggattttctgtctgttgcaagtaagagcgtctaatctaacatagccttgtcttcaacaatctccataaatgctgtatttatttcaggagtcacctctttctgatgacttcttccacctagcgtactatgaacagctctaggatgttggggaataagataaagtttgctggaacgttgcctctgatgttctcttcctaactgaagaaggaacaaaaccaaagtctagttgaccatacagaccacctggtacatgtcctgttgtcctcagggtggaaatttttggatctaaagccctttcttctcttctcttagcctttgccagagaataatacagaatcatggcaaagcaaagctgctcctacctgccagatggcaaggcccaagcttagtggctcagagggtaggagttggtggcaagggagagaacccatctggttgctgacagcatgtaaggctagtggggcatagacacccatgcttaagaaaggaatacgacctttaagaaatctcaaatttagaaacacatactaaacatctcttcctgagcttagaaggagcctgagctttcttacatttccccgttaagtttggaaactttatcattggcagaggtagtaaataaagtctcctagatgccggcattaaagagttaaggaaccctctgttttgtttttaatttttttctttctctttgatattaagattaaaaaaggcacacatttgaaaactaatttaccctataaaaaattaaagcattttttaccactgtttgcttttccagtttctttaatttgggtaattgcttagtcaactttcaaaaatatatattctgtctttaaaaaaacagccaaatatgacggatcaccttcattttcatttcagatttggcatgcaggacccagattgtgtattctttccatggcgccaaaccagcgtcggatacttaattaatttcctttcgtttgtgcaggcttgcacttaaagagacagtgtcccattttgatggcttgcttttggctgaagttcaaaagtatcacttcttaaatcttttttcccccttcaaaacttcccagagtgctctatagaaaaaataaaataaaataaaaacaccctggtgtttttctccaccctcacccttctcttcaccaccatttctttcactcttatttattcgtcgtttaaaccaatctttccttaaaaagaaagaaaaaaatgagagaaaggaggaagaaatgaaagaagcacaaggatgcatgcgctcttgcttctttgctccctgtgttgccttccaagctggtggcgaggctgcacttcatggctatgtcaactggtcaaagtcactggaaatgatcaaagactttttgaacactaaaataatatcttcttaccacaaatgaaggcctgcatccttttcattgacatttcataccatcttcaggataaaacaaaatgttcttaaagacaagtgacagcagggtgcacctgggaatagctatgctgttgaggggaagtgaggaagttgcatgtttgcaatagagaaagaggcggccaacaccagggaacatgcttgcattttgcaagtccttttcctactggaaagtcctgaattattcagcagaccacattattctagaacagaatttcctggttcatctgttccatacattgtggcactcagtattacattctacccagcaattttacacgctcatgtcctgaagaacaaagttattccaacaaattgttgcacagtgtttttgttttttctctcttcgctcagctcgctgccccaagaagagaaatggtgggaaatatttaattcccagctcacagagacactaaacagaaataattttctatgggaagtttggctttagcctagttctgaaacgaaggttcctattccactgtggcttaacatctgctggtttgggccattctttccttctttccttccttcccaccttcattccgtccttttttttcctttcttcctcccttccttccattgtgctttgtaaaaaaattgtggtaaaatacaacacaaaatttgccgttttaaccatttttcaaatatacacttcaaagacatcaagtacattcatgtcattgtacagccatcaccaccatccatgtcaagaacatgcttttacctttctaaattgaaatgccatacccattaaataacaaccccattgctctttcaccagcccatgcccatcaccattctactttctgtctctacaaatctgactaccctagaagccccacataagtagaatcatacaatatctatcgttttgttactggcttatttcacctagcataatgtctccaagattgatccatttgtagcatatgtcagcatttcctttctttttaaggctgaataatattccgttgtacacatggtccacagtttgtttatccattcacctactgatggacatttggagtgcttctgcctttcggctattatgaataatgctgctaagaaacacaggtatataatatctgttcaagtcctgctttcaattcttttttaaattattttgttttactttttcaacttttattttcaattcagagggtacatgtgcaagtttgttgcctgagtatattgcgtgaagctgaggtttgaggtacaaatgatcccagcacccaggttctgagcgtggtatctaacagttagtttttcaacccttcccttaccctagcagtccccggtgtctattgttgccatctttatgtccatgagtacctgatgtttagctcccacttgtaagtgagcacatgtggtatttggttttctgttcctgcattaattcgcttaggataatgctctccagctggatgtatatatacccagaagtggaattgctgggtcacatggcaattctatgttttaattttctgaggaaccgccatactgcttctcataacagctgcattattttatattcttaccagaaatgcacaaaagttcctatttctctacatccttgccaacatttgttattttctgagccatttttcttttatcaaaacattattctgttgcccggtagtttgctaacttcccagcaacttcagcatttattatgcttgagccttttcccagtgccaacgaggtaggacttttcagctgatccatccttcccaggttgaactggaaggtagaaacagacaacgggaaagcttatggatctaacctcctggtgactaaagctgaaacagccttccatggtctgagagtagacgttcagcctgtataggcttggtgaaaataattcttaactatgatccagctgtcagtggcaagaatctgctctaaaatcatttctacagcaaaaagaagtgagcaaacttggaaagaatgctgaagtaaagcaactccttgttggtggccataaaacagcagtccctatttccacctcttcagtcatctttattgccccaggccctgggcagtagggaacctgcacttcatattttattctacccctaggtattagctttactgtctattctatataatatatattctataatatatacacatttaacataacaagcacaatgtattttgttttctatgtaatatttttatcttatattggcaacaaactatatatatccacacctcttaggaaaataccccacttgcagaagtggaagataaaaagcagtcaacactttgcttcctcttatgccggtgtcatcgtgtctatgagatcttcagacttttctacttcttgctctacctctaggttcctgaatgagctgtattttcttttctttctttcttttttttttttttttttttttttgagatagaattttgccctcgttgcccaggctggagtacaatggtgcgatctcggctcactgaaacctctgcctcctgggttcaagtgattctcctacctcagcctccctagtagctgggattataggcatgtgccaccatgcccggctaattatttgtatttttagtagagtcagggtttccccatggtggtcaggctggtctcgaactcccgacctcaggtgatccgccctcctgggcctcccaaagtgctgggattacaggcatgagccactacccccagccaagagctgcattttctatagttcctctctatagtcccggctgttatattgacttgtgtggtccatcatcgattcattctctgcatccaatccagagagagcaccccctagaaaagctttcctccctatctaaaaatgtgtcaaaactgacctaatgtatatattcaaggaatgtagaagacagaaaacaaagtgtcagggaagaaatggcccttcaaaccatatcctttgtaagttaatgatgacaaacagcaaccaaaatctcaggccatattgtgatatggtttggacttgtgtccccaccaaaatctcacatggagatgtcatcccagtgttggaggtggggcctggagggaggtgattggatcatgggggtggaggtctcatgaatggtttagccccatctcctggtgctgttcttgtgacagggagtgagttcttatgagatctggttgtttaaaagtgtgtggcacctcccacctctctcttggtcctgctcctgccatgtaagacgcctactcccactttgccttccgccatgagtaaaactccctgaggcctccccagaagcagatgccgccacgcttcctgtacagcctgcagaactatgagccaattcaatctcttttctttataaattacctagtttcagatatttctttacagcagtgaaagaactgactaatatgccttgtgattggtaaaagggaactaagagggttcctattgaagagaaattgactgatgtattggctaatcaaatcaggaggtctccttaaacagctcggaatctaatgaggaaggcaagttaaagaaaccacagacaaggaaggccagtttgtactatcagctccttgggcaagccagggatgaccagaaatacccaacagggacaaatcttctctctagctagaggaacaaccaccgggaaagagacaatccatgacatcaagctgaaagatgatattggctagtattcagcctcagattcataagccacatatctgccctctagagatgaaacttcaagagcaaaatatgtttctagtgagaggaaatatgaaacgcctgccaacagacacatttatttattaagttactatgtataagcactgtgctgtctatttcataaatatcatataatttaattattatatcacccaccagaggtgagtatcattctccccattttacaggtaaagaaactgagtcagaaaggtcccataactcattcaaaagcccagaggaaatgttggaaatctggctggaactttatccattaaatacacagacgtacaaacaatgtcccaaacatctactgaatgataatcatgtaaatctggaggaaataatgtgtgaacagtacataacataattttctagctcttggatcatcacactatcccctgtggaccaaatccagtttgccatctgtttttgtgtggcccacagactaggaatatcttttatgttgttaaatgctttggaaaaaaaagcaagaaaaatttatgatacacaaaaattatatgaaatttaaattttagcattcataaaatattaatgcaacacattactcatttgcatattgtctatagctgcatttgtgctgcaatggaagagttctcagttgtaacagacacaagacttccaaaagcggaagaattcactgggtatttacagaaaaagatgttgagccttcttctaggcagagacaactcttctagaaaatatctcatacaataaagattgattatcacattgtttagtgtgtaattcatgtgttctcaaaattttccttagaggtatagcagttacagacataccccaaatacataaatctgtgcttgtactaagagaaacttggtgtcaattattcactttccaaaaggattcactagatgtcatcctcagtgattttccttagagcgtttcaggtgggatttgagttatcaaacttggtttcatttgtgctttcgtgaatatacctatttggtaagatctgttttgccaaattcagtccaatacaaattggtcttgaatcctattcaagggagattatgtttaaaggacctgagggacttcattataaccacagcttcttctaccccggatgccccatggcctaagactcccaagagcagcagctttccagccatgtcctgagtttctggggcagagtaaagtcagcaaatcaggatttgccttcagccatctctcagttaggaaaaatacagattctgggggaaagttattcacagagaaagtaaaattgccagtgggcctttttttttttttcttccagaaataaaaggatacaagatgagtgagatagtatagaggttaaaattttaagatattaaaaatatctcctttcaaagccacaagacccaaaagactattagggacacttccaatgctccatttattcaacgcatggcagactgatgataggtattcattctggaacactgagcaaagaaaggtttagccattaactaatatgaatacaaaataagctggattcacgagccaaaattgggatataaaaaccaggcccttgagtcttcttaaataagttcttaaataagaataagttcctctgggaaaataacaatgcattcgatttttgtgcgggttcctggttgaatttagtcattatgactcaggagacttcactgatacgttttagtaagtgttggagtctccccaaccaccctatttaaaatgtagtttctccccagccattcctacccctctcctgctttatttgtctcaatatcactcatcatcatctgacatactatctgccatcattatttaattgcttattgtcccacttccagaatgtgagctccatagggcaagggctttatctgtttcatttgctaaattctcaacccagcgtctggctcacagtatgtactcaagtatttctgaatgaattaagtaatttaaaagggggttcttggcctggctcggtggctcacacctgtaatcccagcactttgggagaccaaggtgggtggatcacctgaggtcaggatttcgcaaccagcatggccaacatggtgaaacccatctctactaaaagtacaaaaaattcaccaggtatagtgatgggcgcatgtaatctcagctactcgggagtctgaggcaggagaatcgcctgaacccgggaggcaggggttgcagtgagccaagatcacgccattgtactccagcctgtgcaacaagagagaaactccatctcaaaaatattaacaataataaaaggggttcttagccgaatgtcagaaagaatctccttggtctttgtgaattgccttgggaggagatctgcactttctcccaaatagtggaaacactaacacgatcactaagtctctaaaacaacaaagaccaatttgtactcttccttcctacaatgttagattgctctatgctatcagtcagaaccaaataaatacctaatgttcaaaaaacctggcacctgacacttcacagggagttgacacctaagtgtgattatctggatttctgaaagaatgaataaatgcaggagatagtagatataaaaatgaaccggcatactttggtaattgatcaccagagagaagaaggttcattctgcaaatataatatttagtttccttgatactactctttgcaggttctccttgaccttctctgatgtttccctctgagtctccctctaaagattattttcctttatctcccccttaagtgaggatataatcaagggttgtaaaatatgctagaatttcatgtttttctatatccagaaacacttagaagataacatttgcacaggacatgaaggaacagggaatgataaggccattatcattgctcctgaaattctgctggcccaaatcctgccctgtcatttctagacaccccatagcagccccaaagttaaaggaatcaatatttctgtgtacttataacctatctaagacacaccaggatactgcagcacaacagctagacagttctcctctactcttctacttctatacatttccagtcaatcttattcgcctatgatttcatcagcaccaagagagtgataactctctccaccaacaactcttcttcaaatgcctacctctcccttagcgtccaggattcagaatcatatgtaccaccactgattaaacacaccaccaagatgttccacacctggctgcatcttctacctaaagcattcttccctcctcctcctccctgtgtagcaattaagcctgtgactcaaggtagaaacagggagttacccttttttccttgtttctcaccttccatatccaaaaaatcacctaggttagccatcctctctcttttacattagctgtctctgctttagttcaggcccatcttatcttttgcctaaactgtgtaagtggcctaacatatcttcattcttcaatctgctcctccaatccagtgatgggctggaatcaacttttactagcggataaaatccaattatgctcttctcttcccagctctgggtttagtgactttaaattggcaccttaaaatttgctaaaatgaaagtatttacaccatggaaattggcaaatgctagaatcaggactttttgttgccagacagtaaattgttaaacatttgctagtatattgctgttcaaatctaacctctatagagaataattcattgagaacaaaaatttagctatgccagacacttgtttagaccattctgtggctcctcattatctacaagattaatccaagctctttaaagtatcacagagagactttctgagctctgctcctgcctgcatctgttatctggtaatatgccccttcctttatgggtgccattaggcaacattcaattgcttgtaatttttcatatcaagctattcttgaccccaggattttgcataaattgtcccggaagcttcgagtctctttcctttattaccctctgttgtataactaactcttcactcatacttcaatacagagttgagacaatattttctgcagaaattattttcttatcacccctagactgtgctgaccactcaccatattctggacaatgagagcccacttttcctatttctgcactacatttgctatattctattgtaattatgggtttctctctcctctcctgtaacccctgcggagaaactaggagatacttgagatcaggaagcatgcatgttcatctgtgcacctccagttcctgaacagtaacttacatatattttaaattcaacatatatatatatatatatatatatttactgtatggtaggtgaatgaatgcatattggatgtgattatagtaatttataacattttaaataatcctgaagcctgagttcatactttcaagtctactgtttgtgatttcttcattacacagggataaagaggcccttaggtttcagccacattcatactgaggcactttgctggaggcttttataaatacatgtttttcagaggatcattctcttttctgtatttattttctgtgcatctggtttgaccatagcacagctgcaaataaactgtccactcatttacaattagaaaatgtgtgtgtgtgtgtgtgtgtgtgtgtgtgtgtgtgtgtgtgtttcaaagggaggagactatgaaatagacaagggggtggtagacttctgtttaacaagctcaccaatatttggtttgttttcttcctgatagacagccaagctaccaggagagccatttaaaaatgcactataaaatgttgtcttgaactagttgttagaattggctttctcttctgttatttttgcattaaaatacagtgagactcctgtacattaattgctccaatgagctttgaaatgtagcactgtggctagcaaaagaggcaaaatattcatttctaagtttgaatagctttgtcaaaaaaaaaaagataggtgcttcttgaacttcagctcaacgagcagtagctaagacacttaacaaattattttccttcctggaaaaaaaagtaataagccttttaagagatgttgcaataacaaagaacatcctttaccatatctttatgtattctatttgaagatcccaaagaaagtgctgaaagcagtaattccacaagtatgtattacatatatttcctttattaatatggtacttaaatatcagaaagaataagtgcatgattatgcaactaagctcaaggccataaagaaaagccactaattaaatttggaagtgataggcatttgctgatgtcaaggaatagtttattgaaattattctgcaaaggtttgatgaaagattttcttcgtaccgcccccatctctcccaccaaaagtcccactaaccatctgttcacccacagcactaccaaaaaggtgacatttattgcaagcttggcattttctgactctttgaccgcaaaatttatgctgaactccccaaaaagaaatgaagttgtttttactttttctccatctctctttttgcctgactagtaacaggaagttcttggaaacctccccaagaatggctggtcttgtaagagtcccaaaccagtcttgaaggcgccagagccttggcacatttgaggtaagggttatggaaacacctgcaccgcccctttcaaccaaagttcccgtgagtaaggcccagaagtttgcatggttgtttatcagtggtgaccctgagtgaggagagctcatgcaaaaagctctaaggcttgtcccaaccaatcttgtacattgattgcacaagaaaatgcttatgaagtattttaaagtgggtagtcaaattaggaccctgagctgaaacctgaggtcaagctatgaactgttccctattcagaatttctccccttgacaaatacaatgtatagtaggagggaaaaatcatggcatgacacctcattagtcgttatgagcagatctgtttttgcacctcgggactcctcaggaatgatttgtgaggcagttcactgacattcctgcttcagtcttcaccaagcaatcttaaacctttgggcctttgtcctctccttctctattctgtgattagaattctgaaggagttggagacaatgcaaaaacaatagtgattatttgcagaaatacctcctccagtgcctgaagctaaaagggctctatctgatgttgttctggatctgggaaatataagggatgtcaagggacagcatgagggttgctaggagaaaaggcagcctctaaggtctctggtggactgcaatagccataaagctcagataactccctatgctaaagaaagggaaggggctgtgaccaagttgcagatgaggaattttgttctgcttttctttttctacttcctgttagcttcattaacttccctgtctcaatagaagctaaaattatgaagatgtaatgcttctcattgaagaatttcttctgtgaaagtaccccaagcccacaaaatagcttaataacccagctcactgatgtctgcaaatccaccattaaatattgttttcgtttaaagtctgatggctcactggaacaaaatgttcccagagaaacatatcaagtgatagctattattttcattttattaaaaataagtaaattgatccatagctaataatagataatgattcactgagagcttacttgtgcctggcactgtttgaagtgctttatatgcaatatctcatttaatactcaacaacaaaccatgcatagcagtcatggtggttgctttgttgagtacatttcaactgactatctcatgataattattacaatgccattccttttttcagtgttgggttaagcgtgggcatgcgaccaaacctactaaaaaacataggaaaggaagtctgataagaggtttctgtattctaaaaagaagatagagtaaaagagataatctttcatctgatatcacaccaatattcctgagtgtgacagcttgagttaatgcaatctcattgccaccacatcataagatgtcccagaagagagaaaaatctgagcattgagtgtcactattgagccactgatcatactgcatctagaccaagctatcttcctgatttccactgatgtgagatcaattttatcactgggtagatgagtttgacctaggttttcctgccactttcagcagaaagtatcctgatgtacaaagtggttgataacattgtctttcccactctacagatgaagaaattaaggatcagagaggtaagataactttctatgtttcccaagctagagagttataaagcagtgatttgaacaaaggactcgggcttctgaaaccacccttttaactatcatggcatacttaaaaaatataaaagaactacagtgttcaagaaaacagcagcgtgatactggttccatgggtaaattataggaatataaggagataattgggaactctgggacattgagacccttgggtggtaagaatgtatggtgttcttttgaggccttgtacaatagtggcaacaattcagctcagtagccagtcattgaacccgttgggtactgtttcccacaagctaacagctcacatctttgtagcaaatgaaacgtgtaaacaattgactgcaaaagaggcattatagcatagaggctacaaaataactttcctttaggggacatgagtaaagagtgattaattccagcagaggatgaatctcttcatccattttgcctttccatggctcatgctactccagaacttcactccatattaccaatggcaagtgccacaaagctttccaatctttttttcttcttcacaaaacttgtttgagcccatcaccccataggatgtggaaaattggtttctttttaaggacccaggataagggatggagtgcatcctctttaaccaactgatagggctcctccagtctctctggctatgaaacttcaaacagactggaactgaaagtagtatcttcatcctcatttactaatcaacaacttatacacaaattctttaccctagtattcaagatatttctctatatacatgcaactatctttcaagattaattcttgatacttcccaataaaaatggcatgttagctgatttagaccattaaatctcaggcacggtggctgatgcctgtaatcctagcactgtgggagactgacgtgagaggatcacctgaggtcaggagttcaagaccatcctggccaacatggtaaaaccccatctctactaaaaatacaaaaattagccgggtgtggtggtgggtgcctataatcccacctatttgagaacctgaggcaggagaattgcttgaacctgggagatggaggctgcagtgagccaagatcatgtcactgcactccagcctgggtgatagagggagactccgtctcagaaaaaaaaaaaaagaaaaaaagaaaaaaaaaagcacatattccagtagaagcaataaaccatctctatataattatatatattcagacattcactaaccatgttgtacatgtttttaaaaaaagaagagaccaacattcgaaaaaaaaataacaggcaaacaaaaatatggtaaaattgttatgtaatgaaaaactaaatgttgtataagtaatttatagaaatctgttaaaattgagtaagaggcagtttcccatagaaaaaagaaaggatgtgaatatacagttcaataaaaaacaaattcactatattatacaaaatattcaattgcaccagtagagaaactcaaatttaaagggttttcattttaaatgatcaaattagcaaatatttttaaatgatgaaatttagtactctgagggaaacagatatctgtgcactactgaggctttgctcagaaacattttcacgtttcactcacgagagttaggtcccaagtcttcctttgaagaccaatcactattgatttagagtccatgcctgatgcagtctggccatgatcaaaagaccatgaaatttatcatcccagacagaacacttttgagtgtgaaagtgaggtaggaagcagaactcaactctggaggcgggactcagacacaggaccaaattgaggactagctaaaacagggacggggcacaggcagcttttccataagacaagcccaccagtgtttaccacgcccacgtcagtttaccattaccatggcaacaccccctgcgttaccactcctttccatagcaatgacctgttaacctaaatattactaccccttccctagaaatttctgcataaaactatctcttattttacacgcaattaaaaggaggtataaatataactgtgaaacaaccttgagctgttactctcagtccactgcctatggggtagccctgctctgcaagagcagtcacagggctgtaacacctccagagctgtaagctgctgcttcagtaaaactgttttcttctacactatcacaagctcacccttgaattctttcctaggcaaagccaagaacccttatgggccaaactgcactttggggcccgcctgttccgcatcaaaaagaaatattgaaaattataccaggcaacaggtataaaccaggacttctcctgaaacctgattcaccccctgaaaatggaaaagcatctcaccctgaaataaaaggatcctcacctaccacctgagcaaatggggctctacaattacgaagtactgtggatgggtggacatgtctgctatgccacgaaaggcagctagacagaaactgacaatcattttctatacttgatcttctgatagacaattgtcctcgttttttctcaaaatttagcttcctcaattttggcttaattcctactctcctttccatccccactgcccactccattgaaggaactgaagacaagggactgattccagatcattctcctctttcattcctcataaagtccacctggttaacggttgtagttaagatccatttgattgcaactgatagaaatcaaactcaaatgaatttaagatggaaaataaacaaataaaaaataaaaactatgggagatattttggctctgggaaatctatggggtagaactggcttcaggcatgtaactatcaaggatgtcttcagaagtgtgttcctctctctctcctgacttcttcgatctgattatctctacttcacttcagtgtagtacacaatctctctgtaggtcagcaagagaacctgcagcctctcctgaatcacatggtaccattccgagcatctgatctcaaaaagtaagattctttatttctctttcctctctctctctctccccctctccccttcccccagctctgcctctgcccatagcagttgcacagaagggctttgattgttcacgtttgcattatgcggcactaatcatgaagtctcaaggcatgaattattctgattgtccagtttgattcacatgctcaacttttggcaggggtgatagatccaaaaaatcacatgggttggggaacagagcagttccctaaagaaaggaatacagtgtacatcaaaatgtaatagatgtctagtactgactaatttttggatctgcccccccaatcacccttccacttagactgaaggcactttcactatggggagcatgtcttatttgtagcaaagtagttggcataagatgacactttctggttttgaatgaataagtgaatgtttcactaatttattcatagaataaaattaatagtactgaaggaaaagcagtgacagtgagcaaaataaaatatacaaatcatatcaatgatctggataaaaaagatagcaatatatagcactacattcataaaaggatatcagtcactttttaataatttctaggaagatttaaaagtatcaattagataatacctttattgtaactctgcaatttgtcctcctaggcattgttattcattctactttttatgtgtcatatttatgaacttgatattgaatatctaaaaatgccataggatattgatctgggcaaataacttatgactaagaccacaaagcaaatgcatcaacaacaaaaataagtaaatgggacttaaactaaaaaggcttctgtacagcagaagaaatgatcaacaaataaacagacgacataaagaatgggagaaaatatttgcaaactatacatctgacaaaggatcaatatccaaaatctataagaaactcaaaccatcaagaaatgataaaataatcctattaaaaactgggcaaataacatgaagagacatttttcaaaagaggatatacaaatggccaacaaacatatgaaaaaatgctcaacaccatgaatcatcagggaaatgcaaattaaaaccacaatgagatatcacctcaccccagtcagactagcaattattaaacagtcaaaaaaaatgatgttggcagagatgtggtgaaaaaaaacacttaacacactgttagtgggtatgtaaattagtacatcctatatggaaaatggtctgaagaattctaaaaaaactaaaagtggatctaccatttaattcaggaatcccactactggatatctactcaaagaaaaagaagtcattatattaaaaagacacctgcactcataggtttatcacagcacaattcacaatctcaaagatatgaaatcaacctaagtgcccatcaacaaatgtgtggataaagaaaatgtggtacacacacatacacacacacacacacacacacacacacacaccatgggctactactcagccataaaacgaatgaaataatatcttctgcagcaatttggatggaactagaggccattatcctaagtgaagtaaatcaggaatgaaaaaacaaatactgcatgttcacagtggtacagtgaacattggagactagaaagggagagggtgggaggagaacatgagatgaaaaactacctattgggtacaatgtacgctatttgggtgatgagttcactaaaagcctagacttcaccactatacaattcattcatgtaaccaaaaaccagttgtatccctaaagctattgaaataaaaaataataataataaaaataaaagtgccatagatttgtcactaattgtttaatcatggtccatttgttcctaaagtagctgggctactcacagctaccagagagtggagacctaataagacctcggtggcagaatgcaattattcctattagaggtaagaatgagtccaaccataacatcgttttaaaatataggccagacgcggtggctcacagctgtaatcccagcactttgggaggttgaggtgggtggatcacctgaggtcaggagttcgagaccagcctggccaacatggtgaaaccccatctctacccaaaatacaaaaattagccaggcatggtgtacggtacctgtaatcccagctacttgggaggctgaggcaggagaatcacttgaacccaggaggcagaggttgcagtgagccgagatcaccccactgcaccctactctgggtgacagagcaagactttgtttcaaaaatgaataaagaaataaaatatagtggagaattatatttttgtggggcaatggctaattgataaactctctcccacctcatgtatgatcactttatgttaattctcagtgtgctaaatactaattcccacaagtaccaaattagacacagaagaaaaaaaaatcacgttttaaggatttttgttccaaaaaaagttttcattaaattgctacaaaaaataatacttactctcagtttagaagcctcttgcctgaaggagaagatgacttggtcacatttcagcactagggcccaagtctctaagcaactttcctcagaaatggtcactgagaagcatttctcccacactgtgtcaaagggctgtttaaaaatctgccccaagtgagaacatttagaaatgcacacgcctgtgtgttaggaaagccatcaacactcttgcagagccatatacctgccctccagggacctgaaactattccattataccagaaactctgtagaatgtaaatccagaggcctgaaacgctgtatatttttcagaaagtacaaagtggaagccattaattccatggattcaccaaatgaatggattgtttcatctgcataaatgaactgtcagaaacaatggccacgcagcacttttgctcccatttcccacagaggaaaaaaccatctcccaaataaggctacatctatttacaaaacttaagcaaagcagcttttgctgaagacgggaaaaaggaaagtttgatttatattctaaaacctggatgcctgaattcaaacagcatgcattagaaatatacagttcaattctctcttaatacacagaaagatgtcagctctgtctttagaatgcaaatgggagcgttcttattgcacatctatggttatttcagcaaacttgcaggagcacttctgtgttgcatctagctttattccttcttgtccctctttttaaaatctctttcctgaaatattttaacccctaagactttgagacaccattcccctttttgctgcctctcctcttgttctttcattatgaaatattcaaaacactcagaatgttttaatgaagagtgaaatgtaagaaacatcatttttacctttacttacccagcattctgaaatctttgcatttttcttaattgtttcaaatttcatttaagtagtaaattgttctaacattgctccttgcacaccagttccccaaattattacacttctcccaaaagttactactttccaaaatgtggtattcattattttacttcatgtgtgtatttttacatagtatttttcaatggtagatatggtacatatccatatgtaacttttttattctatatttatgcacagcattgagtgtcatcaatatgtcacatatagccctaagtcataataacagctatatagtacttcgttgaatgaatatagacagtttgtctaatttctcagtgataaacatatgccttccttttccattatttgcttttcttcttttcatccatgatgacttaggacttttatggactgactgtagcattttgtctttgaagcgttgtctcttttgtcttaggcagtaataaaaagtcatttgtacctatctacttcggttaactattcatgtttttgttcccttaaggtttatttgcatactgtattatgtatgatttttctgcgattatatttctttgttgtgagtgtaggcatagagcttcaggacaagactgaatcttagtagtcatacagtccaattttcattttttaaactatgacattgaaatcaagaggaggtgaatgactcacctacagacataccactgggtctcctggctccctgtcctttctttattcttttcactgcaccaaactactgctcatccattcaattttacaatatttgtttctcaaatattgtaaacattcacaaagaaagcagtttctcaaaaggtctagcacatcttacatccttctcatcagaggaagctaggcactgtgggaacatccaaaaacagttcatgtcctcaaagacattaaactgtaaatgaacaaccaaagagaaatgaaaacattacaggcaactatagttcttatacggaattcagctatgactgaattccagtatcaaaggcagagataagtcttgtagaaggcaaagaaggtgagatctgactgggaaggtgcttgtcagagaaatgttcagaataaggcaagattagagcctgtgcagtcaaggaatacaagatcagatgaagaatattagaggcaggagttccaatatcatcaaagaaacagaagagagaaaaccactcttataaatttaaggaacttctcattactttttttttctatgaactttttcttcttattgacacctttatagtggagggcaggcttcttgacatttggtttctactatctctcagtttcttggaggatccttcttaactgttatttcaacttttgattttggtgtaatgttgaatttataaaaactttaactgtgcaagaataggactcttgtatgtcctttactcatattcaccaagtgtttatcttttccccacttgcattaccaatctttctgtctgcacagctatgtaattttgatgaaccttagagagtagttggagacattatgccactttattgtacatgatagtattgtgtatttcttaggaacgggaatattctcttacgtaacgcaaaattatcaaaacatattcaacaatctcaataacgtccttcattgctttcctccccctttatgccagtacaggatcaaatcctagatcacacataaaactgcataatttataagaaaaacattttgctttgagcttcattgatctagccttttatatagcaattattgaaaatctgtgaagagagttaaagaggcaatccctgttctccacacactcaagccacatggtgaagggtagatgagttatcttattttaatagattacgatctctactgtgagagtcattggatactctgctatgataaggcttccaggaagaggttatattaaagctgagactttaaaaagtagaatacagtagtaacagctttcctttcaaaagtagcatgtgctaaaacaaagtagactgtagcgtatttagagaactgtaagtagctcagtatttcaatgtagtaggggctatatgtgtatgtatgtgcatgcatgtgtaagcacacgtgcatgtagatttggcaaggtttggtgattgatgggagttgaattaggtataagctagatcataaaacaccttctatgttataatgtaaaaccagatcctgaaagcaatggggaattgttggagaaatttaagcaggaggccaataagatctcatttgatttgccttgtctgaaagattagtctggctgcagtattatgtgtgaatattacatcaatatgggtgaaaaattacaagggcttcaaagaggcaacactgtcatgtagacttagaatcttttaaagaaggaaagtggacagaatctagcaattgctgaatggggatggtgggtagtggtaagagggaacagactgtctaggaagacttccctgggcttccaagtcagacctggacccattctacaaaggaaaacagacaaaatctatgatttcaggccattggagcttattctcctaacattctctctatactctttggaaacatggaaaaagtacatattcctgagtcctgcccacacagttccttgactcttatacacaagcttccttgtcttctggaggagacttggtctggtcttggtccatgctccctgggtgatctggccatctctcttcttgcaactatttcaccatttctcttgaagtaagtaagtagaacgccatcttcctttcattaatgcttgggcctcatgtatcattctgccacctactgcagctagactttataataatattcccacaaatatttcgtatttggtgtttgatattccttagactgtttattcttccccttttgcaaaccaatacgcccttttcataaacttgaatacatttctcagccaagagcttatttaaagatctgaaagtttcttgtaaaattcagacgtgagctcatttattcaagaacacttccatttctcaaggatttaatgatgcctcttcccccacccccaagtcagttgattttgtttctaaatcagcaaatcactttcaactacatcagcttaggtaaacttatcttactctcttctgtctgttattggggaaaataaatcatctgactataattctaaaacacagaatgagttaacattatgttatgagggtgggaagagaatggacaaatgttcgaaggagaccaattggaatgaaaaagagaaaggaagaaggaagaccagaggatgattttttgcttgacctcactcttctgagtccaagttcaatcccttctcttaacatacgcatgcctctttttgaaatctcagcagattctttgcttcgacttccactttaatgtatgatatggccctagatttctttttcagtctagatatcattaaattctagcatctctaacttctgagtgggctctcaaaattatttattgttattctagtaaatgccatgttccattgattatttcaaatcactgacattttttattcccaaattaatattctttttaatttacttatattatttgacatacaaaactgtacataatatatacaacttgatgagtttggagacaagtatacatccatgaaaccatcactgcaatctatgccataaatctatcacctccaaaactttgctcttgctctcttattatcagtagtagtaagaatacttagcatatgatctacacttttagtaaatttctaagtatataatacaataatgttaactataggcactatactgtacagtagacctctaggacttatttatcttgtataaccaaaactttgtaccctttggctaatatctgtctgtttcccctcctccccatcccctggcaaccactattccattgtgttcttctatgagtttgacaattttagatttttcatataagtagtatcatgtagtatttgttcatctgtgcctgtcttattttacttggcataatgtcctccaagtttatccatgctgttgcacctggcatgatttccttcttttttaggccagattatttatatatatatatatacgtatatatatatatatatatacacatatatatatatatatacacacatatatatatatatacacacacatatatatatatatatacatacacacacacacacacacacatatatacacacatatatatacatatatacatacacatacacacacacgtatatcatatatatacatatatataatgtgatatatatatattacatttttaatctattcatctgttgatggacatttagcttgcttccccaacttgctattgtgaataatactgcaatgaacattggagtacaactatctctttgagatcctgattttaattcctttggatatatacccagaagtgtgggattggaaaattctatgcacatcttcctggtatttttgcttctatttatttcttaacttttggggaggtttctgttttagaaagagaagttgaaacattagggatgcttagctgcaatttttttccagaaaattgaggtgttatctctgtccttgccctctgtgtcaatcagtcttcctaggagctgtcttcctaagtgccatttccagcctaggtagaagtttagcataactaaaatgcattcaatatgttcctttttaatattacatcccactgtgccacttattgtctgtgcaacattaaggcagtcacttgacctccttggctgctgaatcatcatttttaagtagaaagctgtaaaagataaatgggtcaaggttcttttcattactaagttttaagattctgtgaggtttttttcctttgtcttttcaatcttagttttgtgttccagcttctatagctcctctgagtttccatcacccctctatctattccaaaatactgtcctcacagtgttccttggcgtcttcctagacaatttccctgagggcaaagcaagaatcattttcatggtcatacttgccattcccttctccatattcttcccatttccatatgagaatatgcttctgcaccaaagagtacggagttattgttcttgctgcctcactatgggggccccattgcttatcatgctgtgtgtcttgggaagaaaaacatagctgtgactgtcatcatatcaagccagacgtggatcctcagccaagacaagggatttttaaagatggtggaatcataagtacccgaagtggattgaatagtgagcatgacgtttagtcctgcaataacatagttttggatgtacttaaagatgtatagagaaattctcatcaaagcgttttctgtgacagtaaaaacttaaaatttatgtccaacattataaggctgatcaattcaataaattgcataaaggagtttgagctttagatgaaggatttgaacagtcattaaaatgtttgagctaaaagtgctcagattggatttttgttttcgaaagattaccctttggtgataaaaacaataatttggagaagggcaggaactagaaaatgtagtgatactggtggccttgacaatgttgacggaagtgaatatgaagaagcatatttgaagacttcaaggagaaagaattagaaggaatccatgaatgattggatgtggaagttgggagaaggtttccactaatcagtcataccatttttaaagtctttctacacctttttttcctctgggcccttcatatatgagcttacatcactcacagcacagcctcagaaaatgttatcagagagaaaagtttgtctgcagtgtcaccatctcccttttcaacattctagcttccttttctctacatcttctctgcctcctttaaatttagacatcagcatattctgcagttgttgaaatctgagaatacagaattgggagtccctcaggcccactttttaattcacttctgccattttcaaaccatgatattcggcaagtgatttaactcattaagcctcagtttttatttatgtaagctaggatagtagtgcatattccatagggttatgatgagtgaaatacatcatgcatttataaattacctagcaatgtgcctggtctagaacatactctcaataaataattgttactaacacagtcttatccaggaatgaaagtagatagctttataccttcaaattatttaaaatcagatggttttctctctcagggatatttgcttttcatttttgtctctaatgatgaaatgacagatttttagttctattagatacaattataccaaaagccttaggtagagaagccatttttttaaaactggatttattcaatactttgttatcatattctccccagtctccttcgcctttgtagacacaatcagtcagcacaatcttataaacaagagagaactgctcctgttccttaagatttctggtttgttttttgaccaggctgctgcatcagagagtgaaggctgaaagaaccaacttcctcctggctatgggaccgtgggagagatatctgaattttctaaacttcagttttctaatctgtattctcagaacaacaatagaacactaggatgttaaattggataatgaataattggataagtacttagcatgggatatgcaatgtagaaaacattaaataaaggcttacctttttattattaatagtattacctcttctaactttgttgtatcactttactcttttctttctctatggctacatatttttgacaatagatattacacattagttgagtagcaaccttgtagaaacattcccagatatatgttaaaatataatgttgcaaataagcttgatgaagaaatgtgaaatttgctgccagtttttctctattgctaatattttatctttatctaggcttttgatttgcaataattattcttttatgtttgctatcttctcacttattatgaccatgtttccctttaagtccttgatcataagtataatagctgctttaaaagtcttgcctgattattttcagttctgggtcatcttgagatcagtctccatcaattgattaatttcctccccaccaccacttgggaatcatatacattttttcttcatatataaagtaattttggtttgtgccctgaaaatatatatatatatgtaaagtaattttggtttgtgccctgaatatatatattcagggtacaataatgattgaatttatgtgtgtgtgtatgtgtgtgtgtgtgtgtgtgcattatttattatagcaaaacaatgtaggacagaatgggttcttttccccttctcccttcaactccttcctggctatagcatactcagctccttttgggaccaggcacagaccaagccagggtaattttatttcttaagcaggtattacttgagtaaattcaaacttcaaattgaattctaggactcttgtttttctttccagctttagctaagctacttggggtcttccttgagtatgtatggttcagggatcagttagaaatgtgggaagaatttaaacataaaaatcaaagttttccctttctaggattctcctctcccactttctagatgttgtgactacccagaccctttcctctggctttcctactggctttttgagccaatatgaccgagacgtgtgtatctgaacttcagttactcctatattacagattggagtctgccctcagcctaaaaactcgtaaaaataggaaactaaccctatatgccatcatcatctttgaaatatcgacttctggccaggcgcgatggctcacgcctgtaatcccagcatcttgggaggctgaggcaggcagatcacaaggtcaggagttcaagaccagcctggccagcatggtgaaaccccatctctactaaaaatacaaaaattagctgggtgtggtggcgggcgcctgtaatccccactgctcaggaggctgaggcaggagaatcgcttgaacctgggaggcggaggttgcagtgagccgagattgtaccactgcactacagcctgggcaacaagagcaaaactccgtctcaaaaagaaatatatcaacttctgccttttacaatttgcctgcctttggtcactagtattcccttcacgtatttacattttgtatattgtcaagaattcctagttgttacctgttagagggtgggtctgatatgagctgctaagccttgctgaaagttgaattccctagtaattatttgtatgttccaaacagaataaaaatctacgttgactattgtaaagagaagtgaaaatcacccacattttgtcactctaaaagttcacatttccctcactgtacttctttccacttcttgtccatgaatatacttttaattcattcataagatttctataaaagtattatactgttgtctcaaatctgccattttgattctgtgttccactctctataacacaggccatgatgggcattttcactcctgttttacaaatagagaaacataggtatgtacagtataagcaatttctctaaggttgtacagtaaatcagaaatttgaatgcagatattctgatcttacattggctattctaacaacaaataaggtttacacacagagagagacagagacagagagagagagcacacacacaaaattctctttcttaaatcttacaaaggggattagaattctgtgcttatttcattccaagatttatagccatgcttatgagcttcttgaggcatgagggtaagagagaccaaacaggacaaggcttactctaattccaagtacttgaaattcagtttcaaaaaacccgttactttttccaaaacatccacaaagtaacttctttaaaaagttaacttggctagtgtttctttacctgtccattgctggtatcaagtttccaaaaactaatatactgcatgcttcctacacacaagcaaattccaaaaggagcggtcagtgcccacacataggggatagattcccagcagggtgtatgtgtcttgaatctgtgctttttttaatgtgtgggatttggaaaaaagaatgttgaaaatttcttttccaccataacagtttaggactttaagtcatgtagaactgagacagctatttgccatgcaatacaaacacgagtgccagggcagcccatactttgccaatcttagcatgtcttgaaaaatgcattcgtttggagatgttagttcaagactttattatcctctgaggcttttcttgtagagaaacatacccttggctttcctaggtggtatgttagaccaccttctgtcagggagagttagactgctgaatagtcagtgctaagatgagaggttgttgccggctctttcttgtcaggtttaacctaatcttgtttgatatttcttacagaaaattagatgtatataaaatatcaggctatgagattcttagaatagtaatgacacttactctaatatcccttagactttctataatgttctgtacacaataaatatttcagaacttcttcgatgccattgaaatataaaatctggaaaatttttgaatatagttttaccatcaaattgaggaccatgagaagtgttttattttccaaatccaactggtaaagaagaaattatcaaacaagaatgtttactgcctacgaactcatactaaactttgtatctataaaaatctttatcagtgcaccttaggtattttttaagccaaacacagcctactgccttaaaagaaaatttttacatttttagcatggaatacttttagcatagcatagaaaagattagcatggaaacttttaagttttaagcataggataatactgtctaaaaagaaaaatattttggtttgatatctcagccattttccagtggggaaaaatgaaagacttcaccaaacacatattcatatgttaaaagacatgcaaataacttgataaattacatgccattaacagtttgaaagaaaaggagactataaaatcagatattaatactatattgccactccaaaacaatatctttgcctaaaaatagcaattttcagtgtattcctaataacagaattcctaaaatatgctcctagggaaataatactagcaattattttcaggaagcaatgcttactgtagcttcctccttgagactcacagtacatattattatattagaggctttaagaagacccattcagcccatgactacagaaacaagttttattttgtgaggtagtgtagtgaaagaagatggaatctgaattcaggcagagtgggttctcatcccggctcagttacttatttgtgtaaacttaagtgacaatccgtgagtctctcagtttcatcatctataaaacgggaaacaattgttactttaggaggatctctccagcccaggaggcagatgttgcagtgagccaagatcatgccactgcactccagcctgggcaacagagccagaccctcaaaaaaaaaaaaaaaatcaaaggtatgttataggatggagtagttcaaatagcctctgactgagatgccatcttgcagttgggcagataggattccagatcaggagttcagtgtaggtttgggtgaagaccaataaggaatcagagcgacgtctgttagacctatcactctatgaccatgggcaggtagttataaccacactgagccttgatttccacgtgtagataacctgtgaaatactgcttacttactgtgacacctaaataaaataatatatagtgatgcctataatatcagtatcaataataacaattatcttgttgcttagaaataccatttactaaatattttaatttatggtgcaaaatgtttttttctggattaaaaattcttcagccacacaactccaaagtgagttttaaattaccttttcaaattgtgtaacatcctgagcctcaattataaataagttctaccactccaagcatcctacagtcttcataattgatttgcaaatattacatgatatagttatatagacaaatattcaatttattaaaaaattatatcttaaatgttaaatgtaagataaataaatttcaatcttgaatttatttaagtgttctcattatatgaacataataataataatagcaatagtaatagctccctcccatattcactgagcacttattatgtgttaggtagaaaacctcaggaagtttatttcctttctaatcctcataaccagtgaactaagacagtattattagctgctttttacaaaatggaaaggataactcaaagaatgcaggtaactggccatgtttacatatatttatgtgacagagctgatatttttagcccagttctgagtctcttccctccacatctgaaggatctgcctgttcattagaccaagatgcattacaccaagaccaagaaattcagttgaaagaaaaatctggccgggcacggtggctcacacctgtaatcccagcactttgggaggccgaggcgggtggatcacgaggtcaggagatcgagaccaccctagctaacacggtgaaaccccgtctctactaaaaatagaaaaaattagccgggtgtggtggcgggcgcctatagtcccagctactcgggaggctgaggcaggagaatgacgtgaacctgggaggcggagcttgcagtgagccgagattgtgccactgcactccagcctgggcaacagagcaagactccgtctcaaataaaaaaaaaaaaaaaaaaaaaaaagaaaaagaaaaatctatgctagagtttcatcgataagacaatctaaacataaatcagctttgaaaaacggaggaaattttgttcttgagaggtaggatttggaagcacagagatgagaaggattgttgccaactgaactgtctctccccaaaattcatatattgaagtcttgatccccagtacctcagaatgtaaccatatttgcaaataaggtctttaccaaggtgactaagttacgaggaggccgttagagtggggtcctattccagcatgactggtgtccttataagaaaagagagagacataagggattgcccacaaaaagagaaaagaccatgtgagaactcagagtcaagggggccacctgcaagctcaggagaggggcctaggggcaaccagaccttctggcaccttgatcttcaacttccagcctccagaacacaaatgtctgttgttgaagccatgcagtctgtggtattttgttatgacagccctagcaaactaacacacagaaggttcataagatgtggtgacaattgtgaccaaaagcacatcaaaaagacaccaaagtgtgcaaaaataccaaaacaccaaaaaaaaaaccatagcggtaaaatgtatttatgtttaactggagtattgagaatgaattgggagatagctgccacatgttgggtctaaatgacaaaggacttaaattcaaggcttcaggacagagactttatccagtagctaactgggagcctctgagagtttatgaggaagagaacagcatgatcagagctaagattcaaggaatttaaataatcaatcagttgtagagcatgggatggtttgtagtgaaaaaagaaaaggtgaacaagcaacttggaaagctatagcaaaaatacaaaaaaaaaaaaaaagaagaggtagttcagggaatctgagtgacagtagcaattaacataaggagacagagacaaagaaacatgaaaacagcagtaatggaacttgacattaaaaaaatttccaaaactgtccaattggcggaacttaactttaaagtatattacttcttttccccctttttaaaattacacaaatccttaaaatatgggatgggtttcaacctgttgtagttaagtcctcttgcaggtcattacttgggtgtaattttccctccttgatttgtttttgaggaggaacaaaagagaaagggcatctgagtccccagttccatatttcagaaaggtttctccctgcaaagttaaacatctgcttcccatcagtcccagatgtggcaccgttttgcagcgtggccaagggatgaaatgcagcacactcagtctagcatctcattcatcaggagcttcccgacaatcttccaagcatagacaaagtacctcaaatgacacctccccattcttcctcctcttcatgtgggcctgacagtgtctgggctctgagacttcgagtattattcctgcctacctttcaatggatttcgtgagatcttattgaattccaggccgtgtcttcaaaataggggagtaagtgttaagggtgagaaaggagactaattccatttgcagggcaatctaagagcatctctagctagcctctttcattccaagagtgattagtataaactttctgcacaaaataaaatgaggataacaagggagagaagaaaattaaactttagcaggaaacagagtatcctattcagtaaatttcacttactttctcagcagcaatgagcagtcacaaagctacaagatcactaatccataatcaataccatccacataaaagtctttcagattggaggaaagcattgggtccttaaccccaaacctctggaagtagacactacttctatttatcacaggcctaaaggatcactcccattgttcctattcataggaaacttggaggaaaacaactttccctgaaatttgttggctgaacaagtgactaatcaagtagatctgcagatatgtattaagtgtcttctatgagctattttaggtggtgagaaaagcataaaaatcctgaccatgttggcactttgattccagcgggggacatttacaataaatttttaaaaacatacaatatattatatgatatgaataacatacaatatttaataatacattatattaatatattgtgatatattaatattaatataatatagttataattaattgtattataaattatacaatataatataattactataattatattatataacattatattctattgtatattatataatatattatatataaatatgatattaaaattatattattatattaatatgacacacaataatatatttggtcatacatattacacaatatattgtatgttttattgtcaataatgttatctacaataatatatgttatatataatatataatatatagtatgcttatatccaacatacaatatatactatatacaatatattacacatattatatagaatatgtatacatataataggtatatatgtatacatagaatatgtatatgaatgcatattctatatagtatgtattgttatatatcatggaataatatgtattatacaacacatattatatagaatatgtatatatacaatatataatatacatacctatatatacaatattgtatatatacaacatgtattattgtatatatacaatacatattatatatataatatgttagagtgataagtgatatgtggaaaaataaagttagctataggattaggaagcgttggggaatggactgcattttcctatggggtattcagagtcatcctcactgaaaagataaaggggtggaaggttgggcaaagcaagtattccagagaaatgtattccaggtagagggaggagcaagggcaaaacccatgagcatgtgtgggggttgataaagcagctggagtggagtgagggaatcctggagggtgcaagataagacaccacccagggaccagaggatgaagacattaccaggcattaagcttttgcaatcaaggagatggagagtctccaagggtttgagtacatcggtggcatcatatcactgaagttttggcacgattgtgctgactgctgtgttgagaatagactataatatcgggctttaggatggattaatattggcaaagatctcctaaaactgatgacaggtatataaggcaagtggacctaaaacaatgcaaaaagagaatgatttggagcaaaaataaaactcattttgaatcaaagtataacatgtgagcattctatacaaaaagttccccagagtttaattgtgcagatatgaaaatgagatacatctttgcacttcagagtttgttcttgctactctgtttcctaagaccagtgagccacattcttctcttctctcctttaactagtaaatgatttgtgctcctttactttttgcttagctttggaaaggagtttccactttttgaaagtcgatagtgttttgttttgttttgttttgttttcccccacaattaatgctgagtaacggatttcagaccatctgggcaacctcgattatgctatcattgcatatcccacaggcttgttatgattagggaaggcgaagggaaacacagtatatgccgagtatgtgggctatacttaaagaaaaaaatgttatatcatcacatacaacatctggtggaattcaagattaagttacaaatggttttgaaggccaattattagacaagtgatacccattgaaactaggctgtggttttactacctggcagatttttactgattgctctaaatcagtacttacttatcttacttaccgtgggatctttaacatgcattgcatttagattgagctaaaagggcagacggtggttttttgtttagagtgaaatggaagtaccaagtatataagtgataaaagggtagtaattacttcctatatcgacactgatttcccatcagggaaatgtaatgtgtcatatttgatacccaagtacctaggtatttacgttaataataacaatagtaatagttattatttattgtacccaaaattttacaagccttgcatttcttcctcaggctctatctccatttatcaaatgagtaaattcaggcttcgaaaaggtttaggcaacttaccagcattcaaacaaactgagtcatcgaaccacaattcaaaccaaggcctcctgatccatagctgccacctgtaaagcttacattatgctgaattcatttacattgctctgcaatgtacattactgcacatgtgccatagtaaaccttatagaacgggaaatgtttaatcttgtcaatttactcctctctatcctgacattatatttcttgcatttcccagttacggtttggcacaaacaactttcccagttcctcatgcatggataaaaacataaattatgctgtgttctctggcgcctcctggttcaaagttatcttgctgccaccaaactggacttcatccatacaaatccacttttacataaagaattttaaagaagaatgacaactcatctctgtctagttatttacattttttatgagtattaaatatattcccaaaacttctatgttctagaaaacatagaagtataaatatttactttgcattcctttttattagtgactattatctttaaaaagccctgaatcaatgacaggacaagagacatagcaatgccctttctaaccttctgggttttgtatatctaaactcagtggcataatttattgaatattagtgacttcaaacatatattggattctattattctatatttcagctggtaatcaaaaagcaaaaggctgaaatgttctttcttttgtagctggaccttttatgagttgatacaacttttttttttaatgcagtagtctcagtcctcaaaaatgatagcaaatcaaccctgattcagaagccatttaaggggtcttaatatttcaagaaattccaaaataaatgtatgtttttaaaaaagtagaaaaagcatttgcaagaaacatgacaactcctaaagagaaagtgaaaatattttgtaaatttaactaaagtatagggtttgacttctgactttacatttaccgcttacatgaagggaacgccaatcttattctgttgcatggctattgtaaagccgatacaagcaggtggaactgaaaagactttgggaactgtaaagctattttgtgtgttagtgaccatataacttaggtttcaacctccattgtctcttgaaaatacatattttaaatgaagttttttttaatgaggcacagctcaacacaaaatcttcagtcaaatagagcttggctaagaactaaaccacatttatttctattgactttcactttcttatcaaaagagttcttatttcttatcactaccatatcattatcataataaatgcttttaaaataattatgtatgttcagttttattcaattatgttattgttcattagaagcatacaaaatgcatttaaaaggaaaacaagcagaaacaccaataaacaacacataagacatttaacccaatgaagagtacaaattaaacacaaatttaaataactcatttacataatttacatatcctctcaatgttctatattgtcagaatagacctgtcttagaatctttcatggatgcaatttaatgatttaaaaaactcttaaaattgccccaaagaaaaataaaaatgtcttctcaagttagtatttgtggtccctatagtgatattagttcttaatttatttgcttataattttattttgttttggcttgtttttagagatgggatcttgctctgtcacccaagctagagtgcagtaatacaatcacagttccctgcagccttgatttctggggcccaggtgatcctcccacctcagcctcccaagtagttggaaccatgttggtagctggaaccatgtgccactacccccaactaattttgtttattttgaagagatgggggtctcattatgttgccgaagcttgtttcaaactgggctcaggtgatcctcccatctcagcctcccaaaatgctgggattatcggtgtcaaccaccatgcccagacaatttacttataatcttgtttttatgtatttgttaaatgctgtgctgagttctgagaatatcgaattgaagaaagaaggatctctgcagaaaaagttctgttttccagggatgacaaatggtaatacaacacaactatatgcaatgaaataagcataataaactgagtaaaagaaacctactacgaaagatgctttgtacctttgtgtttgtattgtgtcctcgtctttagtaatactgtatggtttccatcattttgtcttttgaaaagactgtgatagttggacataagttagaaacatttacaattaactctctgcagcatttgagctatgtgtaatcatctttacatttaaatatggttatcattcccttatgaagttattgatatcactgcaagttatttctatggataacatctccttccatctctttgaaaagtcatttgtccaaaatgtaaggaagaaaaagcacataagagattaatgattactagaaagtgtcagtgagtcatagttcatgcgtgtacagctcaagtgggggcaggtgtcttggataatggccacctcaccttgaaccccaattccatccaatcaccagggaggcaatatttcacaccttgatggcagcgtccatggaaaatgtgacacaatttgattactgccccttgaacagtattacagtaaaagaatgcagtttatgacacttaaatgagaaataatttaatgattcctacgttcccaaatgtcttttaccctttattgttatgtagacctcctagataagctgtgcagttatgactatttttcaaatgcagagtaaaagcaagaaaaagtaaaaccaagttggatttaggtcttcactaaaatgcccgattcaccctcagtttcagtcattttcatagtactcttgagtagcaaccattccttttgcccacaggcgacttaaactctgaggtgcagtcaggaaggtacattattaactggggtgggtgacttcgcctgttctggggaaactagatacaaactcctgggtactattagggcctctgtgggttaccatagtgaattccaactaacaacgtatattagtctgttttcacactgctgataaagacatacccaagactgggtaatttataaagaaaaataggtttaatggactcacagttccatgtggctggggagtctgcacaatcatggcagcaagcaaagagagagaaccaagtgaaaggggtttctccttataaaactatcagctctcttgagacttattcactaccacaagaacagtatgggggaaccgcccccatgattcaattatctcccacctagtccctcccacaacacgtgggaattatgggagctataattcaagatgagatttgggtagggacacaaccaaatcatatcacaatgtgtggcaaaagtcattcacctggtagcttgtcttacagcacaagatcagtactgcagaaatcccaagaagaaagagccccaccgattgcaaagactaacacacttaaatgtactcccacttttcaaatacacatgctaatggaagtgcatggtttagcttgagctccctagttttcctggatagcagcagaaacctgctttgctgcacagtggctacgtagaagagctgcttctcttcctagtctcagtcttgggtacatgttagtccaaaatcccagctgtgttctacgtaaagagcatcatcatatttcttcacctatgtgaaaccagccccataagctatttggggccaaagggtttgtgattattacacaggatgttatattttagtcaccaagtgatgcaccttttatgaacaaaataactagaaaatttttcttttattttctaagaaacacacatacacctcttaggatatgcctgagattccatttcaagagaagaaaagtatgatacccacagtgtgcatttaaacagaaagaggaaattcagttattttcttcttgaactaatatgctcaatgtagtgactacaacttaagtggaagaggatagacattattagtatcctgtacccacaaatgacacaactgaggcacctagagttgattgaaacaatccagacaaataaatattttcaggattgagatttgaatgcaagtccaatgttcacacttcctggctttcaggggctgcccaaccatttggtactttaaatcctgttagaacttgaatgcacacacacattaagggcttaacaagtaagttttgttcttcagttcaattagaatgttgtcaaccttataaaataaaacttcacattaaactggttaaatgataagccgatgagccttgttattttatgtgtcaataagtctcaggtggggcagatccaggactgaataattcagtggatcaacgatgtcatcaaggactgatcacttccctcttgctgctctgtcatcctcaccctacgggccatgtccttggcttgtcccctttagcactgccacacagctgctaagggcccaggcatcacaagcagacacagcaatgaccagcaggggcaggcgaggcttcttttgtgatgccttctcttacttagccacacaaccttcctagaaactccttagcacacttcctcacacttcacatggaccacaattgtacacatcatttcttaatcagagcagatgagaaaaatggaattgattttgcttgtaaggagtaaaagagaagtaggagatggttgttgtatttaatcaacaatatctgctatattctttcaatctctaatgtagttggcctatgcacagtgatattaatcattatgaaaggattaaaaaagagacgttactgaggttaattagaatgagagttcagccttaaatttaaaatgtaaatggggatggagacagaaagatattaaggatacagttaatccattaatatacaaatacacacatacccacataagtaaatttgtcaattaaatatacaattaaaaacaatattttaaacatacaggtaaaacatgctgaatatcaaactagtctaactattggaatgacatgaattaaaaaattacattttctaacagatacaaatggtaggaaagttattttttggtttcgtttattcatttgtttttgtttgtttatatttgggctatctgctatgagatttcttgagacctttgctaactagaactttcaaagaccaaggaatacaaaaagcagtatttaatgtccaggtgaatgattatattttctcgttacatttaccaaacttcattgtatcaatttaggatgcaagaagacttcagacgctgctctcaaaatcaccagcagtgaagtagatagcagacacagaaagaacaagtaatggcctggcttctaaaaacagaaagagaagatttatagcctccataaagccagcatgactcagggccaagttcattctgcatccatcccccactttctcttgtcacaggagaatgagccgaggaccacttttgccagcaatctcatctgcagcattccagtagcccctgccagacctggcaagggtattgagaggcaccctcctttttttcaagaagcagggctctggacagaatcaggccaactccacaggtcacacatgagctgctcttgtctgccaatgagctgcttgattggtgcttagaaggtgctggctcttcctgccccagtgatggttctctacaagccatctctcacctcacctgaaacgtgggtgctttctcaaattcctcacaagaaaacattgatacttagtgttctatatctatactcggtcttagaaatgaatatcccagtttggttcgcctgcagaacagcttttaccaatcattaccaatctcagcacatcaccacctcttcctataactccaggaggttcacataaacataagaaaatcaagttttatgctactaatccagactaaatcatttctccctctgggaaagtaagcaagcagaattggtctaaataaactataagaaatcttcagttatgaagaaaaacatacatacacatgcaccacattgatatagagatagaaaagtccctgctcctactactaatatagcctatcttttcacaggtcattgaaattttactttaaaatatgtgtgctgggggcggtcaatggatagttacagttatcaaagtacaaaattctttttagggaaaataaaacctctgtagttacattttttcagggtctggttctcagacccctggttagactgagatgaggactgagatcctgtgagcaaatccttcatgttcctaaagccactgaaggcttttcccaggaggaccccacagaaaggtccagcccttggccaggtgcagttataagtccagcccttataacaagctgcctgggatccagggcattgaaataccagaagactgacagctggaagcctgctggcagtggagcaagaaggttaacaccttcacctgcctctaggcttggtggtattggtggggacagtctccttgcataaggatccacaggggttactccagagatcacaaccatcacctatctgaccacagattttagatctaaaaccaagccccagaaagaactgggacttgggaaatggggcagttacctgggagggagtctgtccctttggagtcctcatttctatagagagatacatagggcaatttagatagagttgtttcagaaacctgggagacagatttaatgatctctggagcttcccttcagccttttttttttttttttttttttgagacggagtctcactctgtcacccaggctagagtgtaatggtgcaatctcagctcactgcaacctccacctccacctccgagttcaagagattctcctgcctcagcctcccgggtagctgggaatacaggcatgcatcaccacccgtggctaatttttgtctttttggtagaggcggggtttcactatgttggccagggtagtctcgaactcctggcctcaaatgatctgcctgccttggcctctcaaagtgctgggattacaggtgtgagccaccgcacccagctaatattctaataattctaatgagtagctctcatagtagaaactaggtatatacccaaaagatagaaaatcagtctaatgaagggatatgtgcattcccacgtttattgcagcactattcacaataaccaagatttggaagcaacccgagtgtccatcaacagacgaatggataaagaaaatgtggtacatatacagaatggagtacaattcagccattaaaaaaatgagattctgccatttgaaactataacttattttatttttatttatttatttatttgagatagagttttgctcttgtcacccaggctggagtgcagtggcacaatcttggctcactgcaacatctgcctcctgggttcaagcgattctcctgcctcagcctcccaccacccatgcctggctaatttttgtatttttagtagagatgagttttcaccatgttggtcaggctggtctcaaactcccaacctcaggtgatccactggcatcagcctcccaaagtgctgggattataggtgtgagccaccatgcccggctttatttactttttaaagagaatcatatcatttggttgaaagcatattcttctttagtttctaaataacagttatttagcttggcatggtttctaacaacatcccagtcataatatatttaaaaaaaaagacagcttttacctccatccttcaataaagcagtaaattcataatacaacgactccaaattactagacaaaaatttgctgaaattgaaaggaaattttatcaagcacaagatgaatgaaattgaattggaagaaaaactggctgtttacacatgaaaaagaagagtcctgcctgaatacaagagggactatacatatatcatattcatgccattttaactactccctaagaaaagcaaaatggctaccaatttcaaaattagacaaccattattttactttaagatagtatttctttgaaataacatgaaatctgtgtgtctctcctccacttccccctcttcccaactgttacactactccatctgtctgggactctatttccaagggaaagtgttcagaatagggatggagcgtgcatacagcagtggttgacttactcatcataccctacaaaacgcatccataattaaaacacagtcagtatctttagaaaaagtctatttcaaagtcattaggtgaagatatatgttctatagactcaggcaacaggagcatctcttacctcagtgtagcatagctgtgtgagatgaaagtttaccatgcacagggtcttcaactgacagcttgctctttactatctcgggagtggaaacaagagcattctatacaccctgtcagtctgcaaacactaagtgatgtatttctctctttatttaaggacaagtaagaataaaaagaaaaaacaactaaatggagcccaaaggtagaaggacttcagaataaaataaaagaaaaacctcataaaaacccaggacatgacaggtacagtggcttacacctgtaatcccaggactttgagaggccaaggcaggctgattgcttgagcccaagagtttgagaccagcccaggcaacatagcaagaccccatctctacaaaatatataaaaattagctgggcatggtggtgcacacctttagtcccagctacttgggaggctgaggtgggaggattacctgaaaccagtaggtggaggttgcagtgagccgagatcatgccactgcactccagcctgggtaacagagtgagaccttgtctcaaaaaacaaaacaaaacaaaaaaaaacgctcaagtcagacaaaaatatgcttctgaaaaagatgtaatccaggaatcaaaagataatgctcaataggatacaagaattgtcttctataaggcaaaagttgaaatccataagtaagcagacagactactgttaacaaataaagtgaaatcaatagacaaaaagaattagcaacaaacgcaacaagcctaaatccaaacaatacaatacacacacacacacacagacacacacataaatccagaagagacaggaaaggattgcatggcaactaaaagtacgacagcaaaatgaaaatctgcattgtagacttttaaaaagcagaaatgacatgcaaacattttgaatcagtaatttcaaaccaaacttgataagcttgtctaaaataaggaggaaaaggacagtggtgagaggacagatgatagatatcgaagctaagaaatacagctatttccaaggacgaaaaaaactgagtaggggaatcactagcaagagaagcactaaccaaatccataattaaatagtattttctgaaactcaaacctaaacaccttaaaatggaaattaaacaggttccacctgttttgaacaatattaatggaaatgaatccacagatgcacaaattatgacaaaatcttgaattataaagaagaatgccattccacaaacgattctgctgatagcaatcagaatttcagatcgagtgcttggaaataaataaaatcttcaaggagatgaatgttgccaatatcactcttattaggagctgcaaagtgtcacaatggatccatatttccactttttcttcttagatcatacaaattagcacatttcaacacaacagccaattttctatttcctttcacctccatagacttgactttgggtctatgacaaacctctctccaacaattttgagctgataaacaacctccagatatagctcttcactttggctttattttatttggatttggttttcaaacatcaaaacatcatgggttcaaagtttctcttgtgtgtcaaaggtcacaagatccaggatgcaatagtgggattttcctcggactgttactaattagctggagaccacatgtttcagggaaataaaaaccagaaagagcaggaatttgtatttagcttcaggcagtgaagcattggatacgttaggtagtatcctctataagaggtataccatgaaatacagctcagtatggataatgactctgtaaagttttattctatttgaaacaaatagattctgagttttagtaggagaaaggagggaggcaattattttttaaaattataaatagaattcatcatcaaagcataagaagaaatttacacatacaatgtgatgaaaattaggtaaaaggaattattaaatggtaaaaacgattaaactttgctgaagtttgaatgatatcaagaatgatgaaacattgttggatccagtgattaggaagccactaacagccatctaaatgtgtagtttttacacaaaggaggtggtagtggttggggatgaagctattttgcaagaagtaccagatagaaacttctccattatgatatttaatactaaaaaacaggtgagaactaagctgtagcctaaagggatatcagagaaaaaaaaatcagaaccaagcaagtatttagtgtgtgtatagctaagaagtctatggcaagggaaggtttaaataagattgtggcttttttttttttttttggaaagtcttgctctgttgcccaggctggagtgcagtggcatgatctcggctcactgcaacctccacctctcaggttcaagcaattctcctgtaggcctcagcctcctgagtagctgggattacaggtgcctgccaccatgcccagctaattttttgtgttttcaataaaaacagggtttcaccatgttagccaggctggtctccaactcctgacctcaggtgatcaaaccgtctcagtctcccaaagtgcctggattacaggcgtgagccaccatgcctagcccaagattgtgactattaatggaacaaggcaccatatggttaatgaagatacgcaaattaaaagaacaaatgaaggaatgtggttttagcaaggaaagaagactgtttcttaaaagatagggacaaaggaagatgagacagatgaaaatacaatgttgagaataaaagggttgaggaagttctcaccaagttagtcacagaccttttaccctttcattaacattgaatattaatccatccatgtgtggaaattgaggagacatggattagatggcaatcttaaaaatgtggaaaaggtttaaatggtcacagaataaagtcaactagagatgaatatgaaatcaacaagagatgaattgtgaccttcctggaattgcatagaattaatcttccttgggtcaaattaacatgattttatggcagtatccagacttggacaatcataaaaggaagaggagataaagtacaatggacgttgcctggggatacaaaatatgggattgataaggcgaggacagagaaatttctgaggaaagttttgttggcttttttatgagagttagcatttttgtgacatgactagccacatggtcctgactgataaagcaggtaagtggagctagaataaaagagacatgtagggaagacctcaggagactggaaagcacaatgggagcagcagagacagtcactatccaacaaatatccactggattctgtgcatttctccatgacagttttttggaggccaggtgatttgttcacttcaaaaaaactgggaacagaaacgaagtgcatctcttgcagtgtgaggcagaaaaaggttgctgtgtcttctccatcccaatctcccactcttgaagtgtttttggaagccatgtatggattgaaacaataatgttacaaggtagaaggagactggatcccagatggagaccctgccaacccacactggatttgtgtgaatgagaagtgagcttctgttgttaaaccactgagacttaattactctgaaaatgaatagaatgcctagcatgcataatggagtgtaaaatacaaatggaaaggaggtcattctctgagagggaattttcacattctgagaccttctaagtgggccagtctctgataatgatgagatctaagatgtggccacacttgggactggatcatgaacagagacaacagagatcaaaggatccaagaaaataaaggaacactgaccccagaatgctataaaggtgtgaaggatgagtttaattgttattattaagagaaagactaactgctttgaaggtacaaagcaaggtaagatactgtcctcaaggttggaagaatgcagtatcaattcatggcatgatcttcaaagaaaaaaaaaatagggcaattctctggaagttaccatggagcccaaatatgtcaattcctagtcttgtccagtgcctttaaggtgggaatggaagggactatatcagagagaagaaaaagaagtggcagtagcattaatgttggaagcctttcagcattctgataccaaagacctctgcccatcaggatttagttgtgtactggtatctcatgaaaagtgagtttcttccaacgcgaggaaagacctgcacagctttgaaaataccctagactaactggcattccctcaagtggcccatctttgttttttagacataatgccttgagatctaatatggtttggctatgtccatacccaaatctcaccttgaactgtaataatacccacgtgtcaagggtggacccaggtggaaataattgattcatgggggcagtttcccccatactgttcttgtgatagtgagtaagtctcacaaggtctgatggttttataaatgagagttctcctgcacaagctctcttgcctgccaccatgtaagaagtgactttgcccctctttcaccttccaccatgattgtgaggcctccccagccatgtggaactgtgagtccattaaacgtctttttctttataaatcatgccattttgggtaggtctttattagcagcatgagaaccaattaaggtaagaccctaagttgtattctagtccctatgaaaaagcctcttcccttgttttattgtagtcctaattgcctgggctgcccggcaatgttttgtgtatgtttgaatcttttgtgatgagaacaaggtagcaacactaaaaaataaataaataaataaatttaaaaagatatacattctcaagtagcattcattgggatgtgttcctacatttcctcctcaatcagaaacctattcctacattgggaaggtttcattgttgctaatgtagtttgatcagtgaattagcagagaagaaaacaggtaaggcagagtatctaaagcagggtttcttcttgacctgaggtctgtgaaccatttcaaattgactcaggaccctgtacattggggtaattattatgttttcctgaggagaattcccatagctctcacctgaaatttaagagaatctctggcctataagtagttgaaaacaatctgtctgaaagaagcactttcatccacaggttacgatcattaaatcatggtttaaaaagatatctaagatacagttgataatcaatttttctttttcccaaagtaaacataattaattcattgattatagagtaagaagtcacatgggagcctctggtttgggatttctccctgcatgggtaacccactgccattctttactctttctccatacacgctgtatacgtgggcactgatatgatttggctgtgtccccacccaaatctcatgttgaattgtagaccccataattcccatgtgttgtgggaagaacccagtgggcggtaattgaatcatgggggtgggtctttcccatgttgttctcatgatagtgaataagtctcatgagatctgatggttttataaagggaagctcccctgtacatcctctcccttgcctgctgccatgtaaggtgtgactttgctcctcatgtgccttcagccatgattgtgaggcctcaccagtcatgtggaactgtgagtcaattaagcttctttcctttataaattatccagtcttgagtatgtcttcattagcagcatgagaacagatgaatgcaggcactgttttattgttctaaaatatactctctcatctctggtgatactcccctgactggggcaacttcactggcacacacaataagtcttataaaccctgacaaagtaaaaatattacaaaatgagaaggcagtgggaagagcgggaggaggattaagattgttaatctcctatgacatagcaccaagtcaactgatggagttcaaaaataaaaagataaacagatttttaactctggaatattttcataattacctttttcttaatattagagcagtgttcacatccttggctgcccattcgaattacctgagagatttcaggaatactaatacctgagtcccatccagtgagattctgatttaattgctcttgggtgcagactgggttttaaagtgttctccgccgattccagtgtgcagtcaaggttgaaaactactgcctaagaggaatatgctaagaactgatgtcactggtgtttacgaaacaggtatccatagcctagaggttaattaagctttattttagtttttcttctgttacactcatggaaaaatgaaggtattatataaagatatctcctgcatagtaaatttccctctctctttatagatgcatccacccaaccatctctttgtatgtgtgcagggtgagttgtcaggatgcacgtgtaatagtcaatgctgaatttggggaaatcaggttttgtctgccttgacttctccttctctgtttggaatttgtataatgaacatcagtcacaattttttgaaaacaataaaataattgcttgtagaaacaaatttttaaaataaagattatgaaaataaggcaaattaaaaatgtcaaagtaaaattgaagattccatgcatatttctagctcataggacagctgatttagttcctaaaaatagaaatgaaaatttttgcctgccaggacttattttatggctactggcagatctttttgctctttttactggaggtgaggatgatgggacaaacattaagtttactctgtcaaagaatgaatgttgattttcacatgtgtgaacagaaaactcgggagtgctaattaaaataacaataataaaaacagcattttataattactagaaaaaaatctagtgaaactgtgccatctgattagaggaagaaaaaagactgtcaatgcctagaaatgctcaaatttatccttgaaataactgagttgttcctactctccctttcccaagtttaaatttggtgcacagttctagaaagaaaaataaatccatctcacagtcctgacctacataaagtccaatatagtttcatacacacacacacacacacacacacacacacacagagacagagacacagagagagagagagagagatttacatatacaggtatatttacatatatattgatttatattaagcccatggaaataatacatggagttgtgaataaaaatatccagagatttatctatgagagagtctatacagtagagagatgacttaataggctaaaaagttgacttttttagccttagcactattgatatttgatccaaatagttctttgttgtgggaactatcctttacattataggatgtttaacagcacccctggccctgccccactagatgccagcagcaacctcctcctcctctccacaattgtgacaaccgaaaagtcacatacgttgccaaatgttccctggggagcaaaactgccttctattcagaaccactgggctaaattataatgtgaaaaaaaatctcaaagaatatagggtagttgctagggtgttagaatgaggaaaattaagatggactttccagaatcaaaatacagcttatgagaattttaatatattttatttcacttgtgtgataaacaatcaacaccttgtgggtacatataattttttatattttaaaatattttccacagtgttggtcatgttgtctgtgatgaatagttatacattgacaaaacagacaagaatattgattaaagatcacatccagcaaattctctgagaaaccatgctgtgtaggcttctagggcatgagacttttaagatttttaccctctccctgtttcctcccagtgaagataatttactatgacttagattccaaggccttaattgagcctgaaattctagttatctagccactgtggtgtaaatggtcacacatctggatgtaattgtctctctgagggctttctcttgcaccaatgatgtcgaagtgctaccagtatgtcttagctgtccacttgacactagtgcagcctacattctctttcatcccatcagatgttctgtagtgaagggattcaagtttgagcttaacaacatgaaaagtctcttagaccatattctacaatccaccttagcagataccatgaactggaattcagacaaagctctcggccaatagcaaagtagtactcttgctaatgttcttcatatgtatccatatatttgaaaagtggtggtgattggtggctgtggtttaagacagttctggtatatctatgagccctgctaaaataccatattagtgtcattttaagaacccccaaggctttcctttaacccttatttcacggcaagggtgagtgaccatttcttagacaatagtttgagattacattgacatattcattaaaaaaacaaatgtgtgtcatctatggaacatgataacatgttttaaatcaagattgaagcaaattagattctgtcaatgtgatgatcacataagcatcttccttggaagaatgaagtcaagaagtacaagtgatcatcacatcaagtgtccttctgtgcaatgagttcttagggccaaggagctcccccaggaggcagggatgacccagactgattttgatgatacagacaaagccagcttgaaaaaaatataaacttgcagttgaactttctcaattataatttaggcagtgattggaccgggcacacctccacgcagacattcatctctactcacattggtaagaagagaaaggggcatgcatagctctgggtggccaagggtgccctccgcctgtctgctggcagcgaacagatgtgaagcagagggctgtcgaggagtccttgtctttctccccagctccctcttcatctttgtgcctactcttttgggtttcctttgcttccttttccacaaagtctgaggtcaagttccagtgtatcaggacctcttctcaccttcattctcccagttccttactgcatgaagactgtggccacagacactgccttatgtcaaagtgaaactacacagatgcacgaatggtaatccctggcaagccaatgtagttgaaacttgaaatgatctttttgctgtacttcaaaagtagtttctatcagtttattgcatttctttacccttaatttattgctgtcacttccagggtatgattttgttttgcttcttttgctcttacagccagttaggtaggaagaaaatgcaaattacaaaatcttctgtcatattaaagcaataggattcacctttcagagttacttcaaagcttcctccttgcataaacaaattaaacagaatacaatgcttttagttgcccacattggctttttttttaaaaaaacaaaaacaaaaacaaaaaaaaccctcctattaattaagaagtataaatggtgagttaatcaaagcagagacatccagtcttgccaagaagatatatttgtgctacttgactctggaaatttaaataaaggattcctttcccaactcaaggttgaagttctaagatcagaatcaaaaagaatgctaaaagggaagccaaactggcagctagataactgaacaaggaaagctgaaaacttgcaaactcgcttcttgggtaggaatgatttcccaaattcagtagagttaaatgtaagttgatgccaatctctatcagggctggtgagcgggcggtggagtaaaaggtatgttacggtagaattacctaggattttctctaactcctgaagataaagtgtttttctgaaaaagactttggataaataactcatgtctttatcaacagaaaaatttatctttaagaaagagggttcagtaagagtgaaaaatattgtggtccagcaaatgacatacaggtctgcagggtaattgtggctcctggggttttatagctatttatatggaaaacggacattttctgatttcttgggaatttaaggtagctctgtgggttttattttcttcttttctatacatcttttttccttcaagtgttattatacagagttggcccagactacaggagacatttaaaatactatgtgaaagaagactgttgcaaatgtgaagttggccattggaggagagcaagggactaatagcacatacagcagctttcagctggagggaaggattggagatcctctgtacaatggaaggagcaagtcagtagcttcttatagagagctccatagtcaaaggagtgcacatgtttgaaagcagagtgtcctcttagcatgctgcatctatgcctctagtgttaaagcatgcattttcctgaacacaattcacacactgaagctgaacatataaatgttataaggcataaacaaacagcagggattcaataccccacaggggtgacatgacctgagatgatacagggaccatatgttcatgtgttaaaaaaagaaactgccttgaggacttaccaccatctcttatgggtgagcagtgtgaatggatgcttccatatttgtgtcccactttcatcttttctatcatgatggtacccttgtagataaacacggtaaagaagagaatgacctactcatttatctgtagaaaatcacaagggtagacaggcttgactacatgggctggcaagtgcatgtgattatacaagagaaggttgaacttcagtgggctccatgtgtgattgctccatttctctaagaaaaattgtcttattctcagagacacatgcattagacctcagggtaacagtcttcctcgtagcacttcagtttggtgattgtcgagaaaaagaagcattcctggaccacgaagccagttatgtaaaatagaagtaggcaatagctaagaacacttaggagaatccttggcctggacttcttcctgaggtcctgatgagaatttttgatttgttacagaaaactggctttccacaactgtcagagctggtaaagcagtccctgtaaggttcttatctcttggtcctgggctggagcttgaggttgggcaggcagttgggaaggagattgtgggtatacgttgggggagatcaaagttaagtaaaaactcacaagcatgaactggaacctcacgaaaggggactgaaactcaggccagttcttgttgcctctgaccttagtgatgaggttatcctctagaagccaggtctcttcattacaaagctgaatgcacaggcttagcctaggagtaggacaatgaaaggaggatccatgggaaggtagagtcattgcaggtgtggctgctgtttcatacccatggggcaggtcagcagatcagcaaccacatacaggcacactgcattctacagagctttgcagatattgtattttctgtacaaatggaaggtttgtggcaactccacatcaagcacatctgttggcatcatttttccaatagcatgtgctcacttcgtgtccatgcatcacattttggtaatcttcacaatagcttaaactttttcatcattattatatctgttatggtgatctgggatcagtgatctgggatattgttcttgttatgtttagaggcaccacaaccactcccgtataagatggcaaacttaaatgattaatgttgtgtgtgttctgactgttccaatgaccagcggttcccccatctctctccctcttctcaggcctctctactccctgaaatacaacagtattgataccaggtcagttaacaaccctacaatggcctctaagtatctgagtgaaaggaagggccacacatcactcactttaacctatttcctatttagaaaaaaaaaaaaaaaaagtacagctcgttgccagtgctcttttctcaggacaaatgggaaatcaaaggctagcaactatcaagcttagagaagaaggcacattaaaagctgagataagttaaaagctaggcttcttgtgtcaaagagccaagttgtgaatgcaaaaggaaagtcctcatggaaattaaaagtgctactccagtgaacacacaaatgaaaagaaagcgtaacagcctattgccaacatggagaaagtttgatggtctggctggaagatcaaaccagccaaaacatttcccttaagccaaagcctaatccatagcaaatctccaactctcttcaattctatgaaagctgagagacacgaggaagctgcagaagacaagtgtgaagctagcagaggttggttcatcaggtttaaggaaacaggacatctccataacattaaagtgcaaggtgaagcagcatgtgctgacaaagaagttgcagaagttgtccagaaaatctagttatgatcattgatgaagtggctacactaagcaacagatgttgaatgtagatgaaacagccttatgttggaagatgatgtcatctaggacttccacagctagagagaaatcaatgcctggccttaaagcttcaaagggcaagctgactctcttgttaggggctaaatacagctagtaactttaggttgaagagaatactcctttactattctgaaaattctagggctcttaaaagttgtgctgaagttcctgtgttttataggaaaaacaaagcctggatgacagtacatctgtttacagcatggcttacggaatattttaagcccactgttgagacctattgctcaaaaacagattatttttaaaaattactgcttattgaccatgcacctgaacactcaagagctctgacagatatgcacaatatgaatgtgttttcatgccttctaacacaacatccattctggaggctcacagaacaaggagtaatttttgactttcaagtcttattatttaaaaaataaggctatagctgccatagttagtgattcttctgatagatcttggcaaagtaaagcaaaaacctggaaagaaatcaccattctttccattaagatgccattaagaacattcatggtcactttgggaggccgaggcaggcagatcacgaggtcaggagatcgagaccatcctggctaacatggtgaaacccggtctgtactaaaaataccaaaaaaaattagccgggcgcggtggcaggtgcctttagtcccagctactcgggaggctgaggcaggtgaatggcgtgaacccaggaggcagagcttgcagtgagctgagatagcgccattgcagtccggcctgggtgacagagcgagactccatctcaaaaaataaaacaaaaaaacaaaacaaaacaaaaacagaaaaaaaaaatcatgattcaaggaagaaggtcaaaatatcaacattaacagaaatttgaaagaagttaatttcaaccctcaaggaagactttctggggtttaaaacctcagggagggtaactgcagatgtggtggcaatagcaacagaactaaaattagaagtggacctgaagatgtgactgaattactgaaatctcatgatcaaactttaacaagtgaggaattgctacttatggatgagcagaaaaaaagtgatttcttcagacataatctactcttgatgaacatgctgtgaacattgttgaaataacagaggatttagaatattatataactttgttgataaagcagcagcaggatttgagaggattgactccaattttgaagcattcctactgtggataaaatgctatcaaacagcatcacatgctatggagaaatcttttgtgaaagaagagtccactgataaaacaacttttacggttgtcatattttaagaaattgcagggtcaggcaaggtggctcatgtctgtaatcgcagcactttgggaggcgaggctggtgaatcacgaggtcagagttcaagaccagcctggccaacatggtaaaaccccatctctactaaaaatacaaaaatcatctgggcatggtgctgtgtgcctgtaatcccagctactcgagaggctgaggcagaagaattgcttgaacccgggagacagaggttgcagtgagccgagatcgcaccactgcactccagccccggcgaacagtgtgcaagacactgtctcaaacaaaaaaaaaaaaaaaaagaaagaaaagaaattagcacagccaccccaatcttcagcaagcaccaccctgatcagtcagcagtgatcaacattgacgcaagaccctccaccagcaaaaagatggtgactcactcaaggtccagataatcattagcacttttgtcaagaaagtatttttgaactaatgtatgtacattgcatatttagacatgttatttcacacttaatagactacactatactataaatataatttttacatgcactgggaaaccaaaaaagtgcatttgtgtgacttgttttttgcaataccagctttattgcagtggtctggaacaaactcccaatatctctaaggtatgcttgtatctgaactgcaaagtaactgctacttcatccctccaaatcacccaaaaccctcccttggggtaaactttaactataactaaagacatacaagaaagtaggattgccagataaaatataggacaaccagttaaatctgaatttcagataaacaacaaattgctttagtgtaagtatgttcctgccaggcacagtggctcacgtctataatcccagcactttgggaggccaaggtgggcagattacctgaggtcagaagttcgagaccagcctggccaaatgttgaaaccccgtctctactaaaaatacaaaaattagctgggcatggtggctgtgcctgtaatcccagctatccgggaggctgaggcaggagaatcgcttgaacctgggaggtggagtttgcagtaagccaagatcatgccactgcactacagtctgggtgacagagtgagactctgtctcaaaaaaataaaataaaataaagtaaagtatgttcccaatattgcatgagacatgtttatactaaaaatgtatttgccgtttatttgaaatccaagtttaactaggtgttctgcatttttatttgctaaagcaggttactctaaaagaaaggccattctgggaaatgtagttcagcctagctgatacattacaaatgcatcgtatcatgaattgggaaattcatgtactgagattatattggctacaggtactctcaattctgctaaggatataagataggatataataaaacatgtctttctacaggctgtccgtttagaagaagtcatcggtaaggaagtattccttcaaaggagatttgagtacacagtcactgtacacatttgtgatgcccaattaaaagttaccatatttcaggaaggctgacctaaaagaatgatccttactcagggaacacaccacagttaccagtggagctttttcaaaagtatagatgactgggcccaactctaagacctgctgaaagagaatcttcagaattgagaataaactgtgtggatgttttttttcccaaaaccacagtgggttgtctaggtgtgtactcttaattaagaacccttgtgggcgaggtgtggtagctcgcgcctataatcccagcattttgggaggctgaggagggcagatcatttgaggtcaggagtctgagaccagcctggccaatatagtgaaaccccgtctatacaaaaaatacaaaaattagctacgcatgttggcatgtgcctgtaatcacagctactagggaggctgagacaggagaatcacttgaacctgggaagcggaggttacagtgagcctagatcacaccgctgcactccagcctgagcaacagagccagactgtctccaaacaacaacaataacaacaacaacaaacccttgctttagagaaacagtaaaacatgaataagtggtgaattctgaatagttcatactaggtcactacattacatattttcctcaagccctccagaaaaatcccctataatactaacttcagacgtaaagaatcagctgtttaaaatgccatagctgtgcatagtgcctgtattagtttgttttcatgctgctcataaagattacctgggactggataatttgtctgtgtgtgtatatatatatatatatttatatatatatatataaatatataaatatatatatttaaaaatatgtatatataaatatataaatatatatgtatgtataaatatttatatattaaaatatataatatatttattaaaatatataaatataaatatataatatattaatatgtaaatatatttattaatccatataaatatatttattaatctatataaatatatttattaatctataaatatatttattaatctatataaatatatttattaatctataaatatatttattaatctatatatatatttattaatctatatatatttattaatctataaatatatttattaatctatatagatatatttattaatctatatagatatatttattaatctatatagatatatttattaatatatatttattaaaatatataaatatattaaaatatataaatatattaaaatatataaatatatttattaaaatatataaaatgtaaatatatatttaaaatatatatatatataaaaagaggtttaatatactcacagttccatgtggctagtgatgcctcataatcatagtggaaagcgaaaggcatgtcttacatggtggcaggcaagagagaatgagagtcaagttaaagcggaaaccccttataaaaccatcggattttgtgagacttattcactaccccaagaacagtatgggagaaactgtccccatgattcaattatatcccaacaggtccctcccacaacacgtgggaattatgggacctacaatttaagatgagatttgggtgaagacacagccaaatcgtattagtgtctctggccattggtaaagtttgggtttttgtgttaatgtcaccttgctgtctgggaggtgggagtgggagttgatgtgtctaatcatttttcattcatttgcactctggtccattgggaatatctctgctatcccgtctgtcactatgtgctatagctctttacctgttgttctctctccctgcctgattccttgaagctgaaagccatatggtactctctgcatctctgactgctctcagaagacaaaacacatggaaagtactcattatatattgaatgaatcaaaactacatgcacattcccctgttgctccttctcttagccttttgtcagtcttcatgaagactttcagtaatcagaaaataacaaatactatttattgagagcttattataaatcaggctgttgtaagttctttattttaccaacttagtccctgaaatgtttttatgagatagatagctgaggaaacagatggtcacagatgaaagtgctggcttttcatcacatgactactagtgaaggaaccagaactgagaccagataccttctcttaactcccaagctgaagtgcttccctggagagccttgtctaggtcagcattgcatccagtcacattcttaaaactttacggagagagaatgttttagaataaaacctgaagtcatttttatagtcgactttctcttcctgagtgtatagtgttctcctgagaaagcaggccctccatggtagaacaaggaaaatgacatataattcacatttcatagagtgagtcataaattgaatcattggatcatctagtcccattgcatcaatgtagagaaagatgaaatgatttctctgaggtcatgtggtcagagggtaatatatctggaatgaggatccatcagttctaatttgaagtctagcacttgccatacagcactggcatctcttactggacaatgccaagccttttgtgtctgtgacttgggcagaatttgggttaaaaatggaaaaacggccaggcacagtggctcatgcctgtaatcccagcaatttgggaggctgaggcaagcggatcacctgaggccaggggttcaagacgggcctggccaacatagtgcaaccacgtgtctactaaaaagacaaaagggattagccaggcgtggtagcgggtaccggtaatcccagctactcgggaggctgaggcagaagaatggtggcttgaacctgggaggcaggggttgcagtgagccaagatcatgccactgtactccagcctgggtgacagaacaagacttcatctcaaaaaaaaaaaaaaaaaaagaaaagaaaaccagagtgctacaccacctcaaaaggagcctttacatcatccctcaaggtggtttctccttcttccccaaaatgtggttcttagttttttcttttgggagcggggagcttttcatttaaacaggggtatccgtggaagacaatacagtcatgggttctctgtttctgtttgggtcagtaaagccccttcctgatccctctttttcacttatcactagagacagaaagtaaggaacatgggcttcaggctgctgaaagcctaaaacaaaacaaaacagaacaacaacgataacaacaaaataaggtgggctggacaagcttagaactttagaacatagtttcagaggttaagtacacaagcgccctagccatgagcctaaacagtattggtccagagaggaaactgccaagaataggatccgggagggcccccatatctccgccagtaaggcaagaaatgggaagatgtggtcctcttttgggtaaatcagcaaggggaatgaggaaagcttccagtatctttactgggacaccaacatggtgctctggcccggcaggcacagtcagggaacatcgtgagatgggggcttcattccatcccagaccatcccaggattcaaaacatattcagagattgtatctttgactttcctaactaattgccgtcccctctttttaaaaaagcaacagccacacaaagacaacttcagagacagagactgctaactagaaaacatagacttaaaaaccaacagtgagatgggagagagaaagaggctgcttcagggaataagtaaaaaaaaaaaaaaaaagccatgattcctcgccattaaaaaaaaatagaaaacattaaacacacatatgccctttaaagagctaaaatgatcggagtgcatttattttctcagttttatttagccaggttggaaaacaaaacccggaaattaatgccaagataacagagatgagggtagaacttttgtctctaataattatcttactatctgtccatcttagatcaacaaacatgctatgattgacagttgaaaatgtttagattagtctgagctcacataaaccatttgaagttttctaggacgggagaatgttataaagcaaacaaataatctcctttccatcttcccactttcaaaccttcttaccacctgccctccaagtctttttctttggaagtccattcacacaactggtggacacaagctttgggtgagacctaacaaattactgcattcttctaaatgaaaaaagagacaatgctcaggaaatttaattatcttcagtatatacggcagaagaaaaaaataattctgataactatcactttcactcccttgcttcctcttacaaattctgagtctcccagaggtcttgaccctctgttgtgaagaatcatcatggtaatgaacaaggagataattgagatctgctgggtgaattcacagtggggacagaagagaatcactggtaaagaaaaacagactccatctggatggtcagagggaggcagaggaggaaaaaaaaaatagaagagctttaaggagaatttgttttttggagatgtgagagaggtttttgttggtgagtcaaatatctccaaggagtgagagtgggagattttagaaaatcgtggactatgtagtaagtgaatgaaacatatccattttaaatagatatcaataaagattaaatgtcttttccatgaatgtcagtttcagattgatgtttatttgaatgtggcactgtggagaaacagaataggaagtacctgggtttgtgtggatgacaaatatttaatgacctacttcaaatgatcacttggtttactctcttaggctgttctcgcattgctataaagaaatacccgagactcggtcatttataagaaaagaggtttaattagctcacagttctgcaggatttacaggaagcatggccccgggatctaagcatgcttggcttctaaggaggcctcaggaagttgacaatcatggtgaaaggcaaagggggaataggcacatcacatgctgaaagcaggtgcaagtgagagaaactgaggagcggggaggtgccacacacttttaaatgaccagatctcgtgagaactcattatcatgaagacagcatcaagccatgagagatctgatcccatgatcaaaacaccccccccaccaggccccacctccagcactggggattacaattctacttgagatttggccagggacaaatatccaaacaatgttatttatttgtgcactgtccctaaccctcaacaacacccttttgtgaggaaaaaaataaaatgcattgtggaaatgattaaaaagggactagatgaagactactgtcaaataatctaaaagattaagtgtggggggtagtcatataataggtaaaaacattggcatagcagcagcccaggcacggtggctcacacctgtaattccagcactttgggaggccgaggcggacagatcatgaggtcaagagatcaagaccatcctggccgagatggtgaaacccggtctctactaaaaatacaaaaattagctgggcttggtggtgtgcacctgtagtcccagctattcaggaggctgaggcaggagaattgcttgaacccaggaggcggaggttgcagtgagccaagatcacgccactgcactccagcctggcgacagagtgagactccatctcaaaaaaaaaaaaaaaaaaggcatagcaattttaaacttaggtcctagagtttatgactgctagaaaatgtgaagtaataaccacttatttattaattcaagaaatgtttcaagtgccttctattttccttgccctcttctgtgtaaagtgattacaacatgaacaaaggagacaaaatatctttgttcctggagctaactttctagcagagaaacacagatcatctataaacaataggtacaatatataggatgtaaagcatgtcatttgggggtaagtgctatgaaaaatatagtaacacaacaaagaggtttaagaactgataaagataagatggcatttctaatttaaatagaacagtcaaagaagatcacactaatctgaaagagccaagagtgtcagccatgtgagtatctggagagaaaacattccaggcagcaggtgcaaaggcccctgagacaggcgcttgacaggcattctcaaggaaactacatgttctaaaagattttataatttttaaagggttttttgttgttgttgttttgagatggagtctcactctgtctcccaggctggagtgcagtggcaaaatctcggctcactgcaagctccgcctcccgggttcacaccattctcttgcctcagcctcccgagtagctgggactacaggtgcccaacaccatgcccagctaattttttgtatttttagtagagacggggtttcaccgtgttagccaggatggtctcgatctcctgacctcatgatccaccggcctcggcctcccaaagtgctgggattacaggcgtgagccaccaagcctggccaaaagttttattttttagtgtattccaaaatgggataagaatgtcagcttcacagaactgttgtgaaataatttaaaataatgaaaagtgctcggctttttagtaattaattactgtgagtaaggaaatagtatttttcttgccacagtgctgatttgtcaagagatgtgtgctgacttccaagtcaaatcacacaacaggctgtagttcagtctacctagaggcaaaaaaccactataatgatgaacacagattcaaaccccaattaggagatattactcaacatctcctagatgttggaatagcttactcaacatctctaagtctctcctttgtaatctgtcaaatggggataaaaatatctatcccttgagattattgtgaagtttaaataaaacactgggaataatggaaaaaatatataatagttcaaatgtactaaatgctcaccttgtgtggggcacagcataaagccatttccctcataagactacaaagtaatattatcatacccatttttcagatgatgagactacagtctaaatcacatagcattgggtccataacaagtgaattatggaggcaggatttgaatccaggagcctgaagacagagtctgagctgctgactgccaaattcttaaccccctcattgctacacctggcacaaaattaaagctcaattaatggcagaagctgttactgctgttgatattattatgccactcagaagaagaaactcttttcaaaggtgacaaagcacacatttaaaatagtaaggctgacagttacagacagatacacccatcatcggggttgaacaaagaaaagatctgctcgccagaccccagtttgcaatagttaaaaaattgagtcacacgtgtgagtcatgaataaaatccagggaagacacacagcctcactctatctagtccccgatattctaaaattgggactaccaagacctagaaaaatgttttgtgagtcttcttttaatgtagactatgtcttgtttttctcaacaccccaaaagacatttaaggagagtattgtcagcagcctcagcccttctccctgaagtgtgaaataaaagtaacacaaacaagcagctatatttcctccaatccctgggctttctctctaccccacgcaacatcacgacacacacatgtatttgctgcctgtcttccttttcatggctcaagtcagtttgcacagatggttttcgaattgacttcttttaaaataacttatattacaaagttggttttctgctcctgccagccttaaccagaactgcttccgtgtgcctccttagaaactcccatcccaagcagatctttctaccttccactcatgcacatgtgcacacacacacccacacccacacacacacacgtttattctagtaaactcctactcctgcaggaaatcatgaagaacccatattttgacatttatacagaagtatcaccccagtattttaaaagttctgtttcacaactgtaagcctagcactctagagggctgaggtgagaggaacacttgaggccaggagttcgagaccagcctgagcaatgtatgtagcaagacccagtctctatgaaataaataaataaataaaaattagtaagcatggtggcacacacctgtagttccagctactcaggagactgaggtggaaggatcacttgagcccaggagttcgaggatgcagtgagctatgatcgcgccactgcattccagcctgggtaacagagtgagaccctgtctcaaaaaataataataataataataattctcagtttccctaaaaggtagagaataagaactccttataggcaaagtttatattgtggcaatgccctacagtatataagtaaatcttgtgtcatataataagttttcaaataaaaacaattgatgtgggtagtagtaatagaagagaaagttttgagatagaacagagtattatgggcgggtgcttatacctcttaggagagtattctgctgcacagaaagatccctagaactgcttagcccattttatactgggttttccagtctcagttggtgactagactaataaagattgaattcattttagctagtacttattaagcatattattgtcacacacctacatatatgcatgctcccatctcagggaacaattgtctttgaaaatgctcaacttctaatcagagttcaggaagggaacggaaactccatttttattctctttcttgtagtccaataagcttatcctggtaaataaatatccctgctacaaccagaaagcaagcttttggttttcaatttagcttcatccatctccatgttcttaactatgaggagaacgacagaagctataggattctcaggtctactgcaaactcaaagcattttaggatgcgacagacttcgagagagaacgctacggatgcctggattggacttcatgctcaagacgctgttaggaggccgttcagagccactgaattcaatcaccatgagcactccactctctcttgtattcactttcagatacatgcactgatttttgtttcatgtcagtttccgctcttacatttatcttgcaaactaaccattgctagtctctcctcccatgcaacttttccaagtgtttgtaggcaaattaataaagacttcgccagttaccaaggcaattgcaatgagggctcctcaatgtggtacctttattccaataagattttctgtctccaaggtggaattcctgccaaatttctcttttcctctcatttccctcctatttgagtaaggtgagaaatgaaaagtaaagtagtagggtcgtatttaacagtgtcagatgccaggacacactgctccttcattgtcccgaggctttctaaatggagtcagtgctgccgggaatgtttcctcccttccagcccgctttcgccttcttatagagtgtatcaagcaagtcagtgagctgtggttttcctattcaggccaaggcaagcaagctaaatgcgctttgagtgctgaaaggcctctgggtcacttcatggtatgcaatgaatcagaaacttaccagggtattgattcatattcaggacatatttaaatgtacaagcaatccctgttttgatttccatttccatttttttaaatgtctatgtcgaaatcttaggtgtggtcaggattcagataaatattaacatattacaaatcatttagataatgtcttatgttcaatttagatttcattctgccattcaggatattcctttagaaaaataatttgtttatttatcttttatgtttgttttgctgctactatattactgtatgtggggaggggtgaaaagtaaaatatatacggcataagacatgaaggtagagacccaatgtgatgattaattttatatgtcaacttgactgggccatggagtgctcagatacttagtcgaacataattttgggtgtttctgtaaaactgttttggggtaagtttaacatttaagttgtaaacatttcaatcagtagagcagacagcccttcctcatgtgggtgggccttatccaatcagttgaaggcctaaagagaacaaaaagtctgagcttcccctgaatcatggggaaccccctcctgcatgactgcttgagctaaaacaacattttttttttcctgcctttggactcaactgaaacattagctcttcctaggtctcgagcttgctggctttcagactagaactacaccatcagctctcccagtttttaggcctttggactcagactgtaactgcaccataggctctcttaggtctccaacttgctgactgcagctcctggagctgacttgtcagccttcataatcacttgagcccattcctctttctctctgtgtgtgtatgtgtgtgtgtatatatatatatatatatatgtgtgtgtatatatatatatgtgtgtatatatatatgtgcatatatatgtatgtatgtatggagatatatatatagatatatatagatggatatagatagatagatagaaagatagatacataatctccatcccattggtctgtttctctggagaatcccaatacattcaacttcttgtcaagtaccttcaggatcttaatagattcactacactctctaaggtttcttttccccttatgtaactgcgacagaaaaaatgttcaaatgcctcccagtgacactgagatgataaaaagataaatcgcaaagagatcctagaagaatacaccatagatatccccatgcactaagaaaatctttcttatggttttgtccagcagaacctagcaacctttcagctctgactgaaaatggaagacttagctctccatcattggcaaggaaaagctgtcgtgtgctggccttaaccattgagatattccttattccttctgaaaacttgtctcttttggtggaaaggaatggaatcttattcataatcttttaacaataaataaaccctaggtgcttaacatgaagtaattgaatgtggacctgtctctaatcagagaaaaatcgtacttgaaatattttttgtgtaagacaaatccttttttaaaacgttgtactccagctcttaatgataacaaaaaagagcagaattttacattatttaaaaagtctccattttaatggttcaaaatttggtggacataaaattaaccaatatttttaagaaataccatttttatattagatttgatttatacaactacacatacattccacatcctgtcctagcacaatattttcacatttaataactatttacgtgagtgagtagctaaatggctggaaagtaatattgcatggttgtggaaaatacagactgactcagactgacggaggtagagtcatgcctttacaaattaataagtatatgacattgcaaaaattactgaaactcaagacttggtcttaacatctacaaaatgggatgatagtagtagtgagccttaaaggagctagtacattgcatactgttcattcagcaatatacctagcacatagtaagttttcaataaatactatcactgattattagaatgatgacctataaattgatcagaagtgccagaggtaacactttctaactgtagctgtactgctactaaagaaggataaccaccttctcaaattggtactccttttccaaagaaaggtataacaggaagggaaagatgatgcagggcaaactgaccatcatgaagtacacattcttcttgatgctttccttggaggttctcagaagagactggtgaggaaactgagtcatggacatgacataatctcaaatatgattataacactgaaaaggacatgggtttctttttttatgtagcacattgacataaaatgaatgcatgatacaatggaattacttgctctattagtctgttctcatgctgctaataaagaaatacccaagactaattatttataattaggataatttataaaggaaaaaggtttcattgaatcacagttcagcatggctggggaggcctcacaatcatggcaggaggctaatgaagagcaaagtcatgtcttacatggcggcaggcaagagagcatgtgcaggggagctcccctttaccaaaccatcagctctcttgagacttattcattatcatgaatacagcaagggaaaaacccacctccgtgattcaattacctcccactgggtccctcccatgacacatggggatgattacaattcaaggtgagctctgggtggagacacaaagccaaaccatatcacttgccatcaggaataataattcatacaccaatgagaatagagaagggaaggggaaatagggaagaaaggatatgaagaacagagaagggaagggggaaaaaagagaatgaaggaaaagctggaagctgcatctgtagatagaaatattagcactttattttgctttctttttaactaaacatgactggttcaatggaaaaggcagaagcttttcaatggaaaaggcagagcaatccctatgattgctcttttctcacttggtgtttacttccatgtcccaaataggctccagaagatccttctcaaaagttacattttactgtgtctttcatccactcaacagcctttgatggcatcacatccaactcagagtaaaacccagcgtctttgcaatgcctcacacaccctatgtcttttggtcctgcccacctctctcatctcctgccctgtcacattctacaccaaccacactggcttcctcactgagcttccaggaggcctttgcactggctgctccctccatggaatacttcccctagataatcatatgtctctctccttcaccttcctctagtccctacataaatgttcctttattagaaatatcttccatagcctaatcccccatcagcctcttccagtgtcatagtttaccctggtacttactgtcacctctatgtacataatgtttgtttgattctatatgtcttcacttcctgtcccccccttaccaccaccactagaatgtcagctctgggagagcatggacagtatacagtttactgctcttatatatcaagcctcaacaaatgacaactcataattagcactcaaatatattgttaaatatgtaagtgaatagaaaagaaagcagggaggtggacagggaaggaggtggacagggaaggaggtggacagggaaggaggtggacagggaaggaggtggacagggaaggaggggaagagggaaggagagaaggtcattgatatggtttggctgtgtccccacccaaatctcacgttgaattgtagctcccataatttccatgtgtcatgggagggacctgggtgggaggtaattgaatcacggggcagagtctttcctacactgttctcatgatagtgaataagtctcagaagatccgatggttttataaaggggagttcccctgcacaaactctcccatctgccactatgtaagatgtgactttgctcctcagtcaccttcagacatgattatgaggcctccccagccatgtggaactgtgagtccattaatccttcttactttataaattacccagtctcaggtatgtcttcattaacagcatgaggacagactaatatagtcatttaccgcttgtggatcagcttacttaaaataatttcacctagatgcaggctcagtcttccttttatacacagctatggcctggctagcagatgtgtgagctacttggtcctttacgttaagaacgctgaaaggcaaggcaacaggaagccaatggccccaccacagcacacttacatcaggctctgcagtatcatatgggaaaagcagataaatcacaggtggatcatggacattacatagaaagccactgctgcagtccaaggccactccaatccttaatgtcttctctgtactagtgtttctcaagctccactaatagctatcagtcacttaacacaatgctaagctctttaccgaatgttttatctatcataatctcatttaatctttggaacaactctgagcaggaggtgttataatcccatttttacagatgacagaacagacttaggtaaagtggttcacccaatttcacacaatgaatacacaacaaacccgggttgggaaaagaggctgtcagactccaaataccaaaacctccaaaaacctctacccatcctgccttctaattgtccagctaccgtacccgaacctgtctttcaaagactgaatcccataaggatacaaacaaaaaaaacctctactctccctgatatggccattgatctactggacatgaatactgtcattacctttttgtcaacggcccaaaaaaatgcagcagtattataagaaatgcttttgcttgctattacattttacacattaaaactacaatgcatcagtagtttgaaactgttgtaatgctactgattactcagtttgctgccatgatatctacaaaatataaatatgataaagtaaaagcaaacatgttattgtcctattgagagcaggacttgcagaagatgctagggccagcctctctgcagtgtgggagatgtgggagttgagagggagggaattctctgtcatttttataaaaactttgtgtgccacatacagtatatctgtgtctcgatggatcataacattatcagtcaaaaactgctttttagatctcccaaccttttgactcaatcaaggaagagtcattacttctaagcatggcaatctacactttatcttaaaaaaggggaaaaaatcattaggcagagtttctaatgaaataagtagaaagaaggaagaatgatacatacatgctgtcttaccttctttcccttgatgttaaaatggaaagccacgctatttacatgcctaggagtcccatacttagcgtaattattatgaataatgttccagagacaagtttaggttttcttctcctagaaatactttgagaaggtagaagagatgagagagtaggagagatggaatttgcatatccttataaaataacctctaaaacctatgcttatgatagaccctgtgctagaggattgcatatacattatttcatttgattttcaccactttgaaaaagatataataaccatttactattaaagaaactgaagctcagaggatttaagtgatttatcccaaggccacattgccatttaggaggcagactgtttgggccagatccatgggttttcctgctactcctgttgccccagatggatacagcatgtgttactcccgagatggcattgctatgagcctcaacattcacaaataaattgcaaggttaccaaattctcaacatttacaagaaacaaaaaaatgactaggcagattttctacattataggatccttaacagaaataaaaaagcagcccgggcacagtgactcatgcctgtaatcccaacactttgggaggccaaggcgggcagatcacctgaggtcaggagttcaagaccagcctagccaacatggtgaaaccccgtctctactaaaaatacaaaaatcatccaggcatggtagcacatgcctgtagtcccagctacttgggaggctgaggcaggagaaccgcttgggaggcagacgttgcagtgagccgagtttgtgccactgcatcattccagcctgggtgacagagcaagactctgtttcaaaaaataaaaataaataaaaaaataaaaaacaaaagagcaaccaaccaaccaaaccagagtcgatcagccactttaagtgtcctctcagcttttaggccacagcagaccgttctaattggccacttcctctctgttcactagagagttccaaattggattaatatcttatcccatctgtaagtgctgttccgtctttgtgagcaaacctatccgggtttttccagcttacaggctgccagtcccttggtgaagtcaaaatagcaattttcttattctgttactagctctactcagttaactcagattaagaaaaattatcaccttgttttgaaagaactctgacttcacaggggccatggttatgctagtttcagaacctctgtcctctgaggtcatggaatacagtagctatgtggaagtaatggattagaagagaaaaatgagatctccttccgcttcctcctcattaatatttccaaagatctctgagtcgttgccaaaactgtgactgagcattcacatgggttttcaaggcaggttcagtgtttgcttaagttatatggtaaccttatcagtttcacttcataagcccatcgcagttcagtttgattttaggtttctgaagtggagttggtaatttctaatagatgtcaactactacaaagttcagatgtggaaccagacatatttgggctgcaagtttttggaaaactggagctgactctcttgagagatttccaacagggaggggctagcacctttttgccaagtttagaccccattccaaatccaacagggttagaaccctcaatcttggcttgaaaattctgcaagatgagggggagttctgttttattttcctctaatttagcagaagtcttcttagctttcagaattatgcccaagggaaccatgtatagacttttagtggctctgataaaaataaaacctactttcaatgacttaatatgatttttttaatgtttttatggttttgatcctacccagccaaatgcatctgcagttcctagtttcattgtcttagcatgattgacagggatctattcattggagaacactcacctgtaaatatatctcaggaaataatttttttatctccctaaaagttagagttaaatcactcctctaaaactaattgtttctgcccaatagcaaaagtcactgcttggcaggtaaattatgcaaatgcaatttgtctatgctccatgttatttctgtgtatggaaaagttgtcatggccagggcaatctatattaatagaatgagtagaagaaacaaggagtggcctatatggactggataggacctgtgtagaaaatggaaggaaagcggggcttaagtcaggagaccttggttaaagccccagttctgccactcactcactgtgatctatcaatggcaagttatttaattactgatcttggctgtaaaagaggaaaaacaatacctgctttatcttgagggaagataacgtatatgaaagtacagcataactacacacatagacaaaattctaggaaccgtaaaaaaatgcttatcctgaattctatagtctgcatccatttcagaggatatgaaataggatcggcttagatcatccaatgtctttatattcctataacatgatgcaattttttaggaacaaaataactggtgactgtagaaaacttaatagaaatcttcttcccaagtctgtctctggatttgcccgtaaaaggatctcctttaaaacaaagtctggaaaagaccaatgatgatgactgtcccagactggcaatgagcaaagcctccctcttcttattagggaccaattaatattcatgtagtcccaaccctgaagggatttagctccagcatttcataaaactgaagtaatccatcatccaaaaagggcaaagaggcaaaatttctgagccctttttctcaaactccattagaaaatgtaagctcacgttacttcccctccctaaccctttcctgctttatgaagtgagactattgtggataactgtggtctcgtaatgcatttttggccagccaaggcagtaccatggcttcagaaactctctttagtaggagttggccagtgttctattgtttgcgtctgggacatggccagtggagttcggacatctgcccattgtgtgagttccttgggcgccagagggctgaagctcattattccactgggaattatgcctctgttccttgaaaagggagtgactcaccaacaaccctctatcacatctgacatttggaagacgaaaatcctttgtgagttccaagtttaattttgtgggtgagtttcttattctaaccaagctgatccataaaggtattgactggagtttgttctttggtaagaaatttgggaatcccatttctagatgtgcctaggattatgccaatccaaacagtctatcccctctggctgcaaaaccagaggataaaaagagagaacaagcatcacaagaggcagcaggggcagtgctggcatggtataaggagctggcaaatttctcagttctctcaataattttgcttttttcatgccccttccttttaattctattgcaacccattccaagacctctgagaatctcaataaacagttctattttaatctcctacttttgttattaactagtaatggcacattggaaaagcttataatccaaagtttcaattttttgccttgaaaatgggcactatattagcatgtaccacacaaggcagtgaagactaaattgcttagtatgagagcatggtacataataaatgctcagtaaaagtccgagataaaaatgatgacaatgatggggtttacaaatagctcagcacagtagttagcatgtaataatgacttgataaatgatgagaattattattaaaattatattattactttttctaagtaaagggtgagaagagctcagtcagcttatttgttaaagtttatttagactatttcccattaaggtaaacacctggctttggccaggcctgaaattgaggcttgaccttgaaatgccatcacctctgctgttctgtgaccttgctcccagcacccgttgaccaacattttagttccttaagaggttctaacctagcctttatggctaacaatagccaataacttccaggaaaacaaaaagcaggatattggggtctcttggcctctgcatcaaagaacagctggatccaattcagagctttaactgaagaaagaaagaaaaatggatgcccttcctctggtcgtatgtcaacttttaccgactgtgtctctaccacctgcaagaacagatgcaaatggagtgtttttattagggtaaatcttccagcagattataagaaatggccctgcaagaaaccagtcccattgggaattagttgacaacaccctctgtggatgctgcggcaaggtgtggcccttggagcggaagagttctaggttcaaagcctgactcagccccctgaccttgggcagctttatttatctttttggagctcaggtgcttcatttcacataaagaggcagtagagaattacacgcttacataatacttacctgggagggccactctgagatttcaatgagatcctattcactaaaccatgtaacacagcctatgagacttagtaagtatttgatatgcattaatatgtgttggtttcctttcttcttaagagtttttctgaggagtaaatacatgtagagggagtaatatggtggcaaatatacagttgatgcttaataaatgttacttctctaaaaggcagtaaggaattctgagttctgtgctccctgggagtaagactctgatgatgagtttccagtttcctgaaagccctctgttcctctactttagcctgttactgacatggcctctttcaactcctccatcctcttccccaattctatagctcacatgcctgccccaagaatctcagaaaagccctttcctgctcctccagggagtctgcaatacaggccagatactctcaaagattggaagacttttaagtctattcaaaaaaaaaaaaaaaaactatcctttgtctcaggccattatttcttctcttattttgaaagaagtaatttctccttcttcatttatatcattttgctgagggtatttgtggatcatcagcctatatgtcaagtcttctccttggttacaccatataaattcagttctatatgtaagctaaagtgactacaactagaataggaattaaatatatttcaggttttgcagacaaacaaaactccttttttcaacccagtttctctttggataaaacattatcctcagtctataaattagaattttagtgctgtaggtaccgcctcattttggaggcaagaaaggtaaaaaacttgactcaaaggatattttcttgctaatggcaaggtcagaacttgcacacaggtggcctggttcccaggccttttgtcttttcagtatctgatgatacctgacctggtagggtcacctgaagtttaaactactctgcatcataagaaaatcttttggtgtgtgggatcctgctgagaactcttgcattccctgtacactgttcatgttagtatccatggactacttcccattcctaacatgttcaatggacatttttccactctctgtaatgatctgtctcaacagtctctctggaaaattaactcatcctctaatgtccaactcaaagttcactttttttctgttaactctccacaacttcctgagaaaaatcaatcacttctccacctgtgttctaatagagctttgcaaatgtctcatttattgagctacagatatttgtgtatctttatctctccactagactgtgaattgttcaaggttagaaattctattctattcatccttgtatccacagctctccagagtttgacacgtggtaagccttcgtaattcttgtttttgttaatttgtttttggtttttgctgataattttcatattagttgcattaagtgaataataatgctttacatggttctgatcaacattgaaacatgtctaaactgagtatcttggatttctaggaactagaagtactgaaaataatatttgacaaattttacatggaggatttggtaaatttatgcaaaaagactaagaaagtttgtagaatcagagcaccatgcagaatacccatggagttccctttattctttaaagtagtttaatttgttcaccataaaaattccagaattttctactcttgacaaaaataataccaaaaaacccacttatgatatacagttccatgttggaatatcaagacagacaaatgttaaactaccgcaaaataaaaactactattttggaaatagaataataacacagcactacacaaacctccaacgacttcaaatttagtcttttatcccaatatggtgattaagtcttcaactataattaaaatactttaatatattttatcaatatctcttacagtataattgcttaaaaagtaatatgaactctaaaatatgctaccatccttgggagatatcatacaatttcccaagtctgtcatttattctttaatattttgtacttcattcagctctaaagtagaaatagaggaatactcacatacttggtcaatggcttacaagctgtgaaacacgaacgttgaattaccaaaactgccctctaaatagcatctatataggcaaattcttacttctgagacattaagggaatcagtccactgcccctcccaccactgaccttccttgggttgaaagaattatttcagttgtattcagtttacaacttagcttgccctgggataatatcagactgatgttttgagctatgtttggttattcttggcaccagacaataatggtttctaccaatcagattatgacgtgctacaatgagaagaaatgtagtattaagaaaggtgaaaactggaaatacgtcctaatacatggaatgtacataacattgtagagtgataaaggaagtaagggaggcttcgggggtatattttgtcttaagaccagagaacaaataccattcaacacaaactagaaagagacaaagcaggatcgaatcctcatatgttgacatcagcttgagttaaaagctacaaaggtaaaagttatttgacataagtgctgctgttcagatttctcaatattccatgttaacttattttactttggaaactgagaaggaaaagaaatatcagcccataggtggaatcattccacagatcatactaacaaggctctcatcaataaggtcataatgatgatggttagtgttacatgctgcacttgtgttttttaaaaactgtatgaacacctttaagtagttgaatcctacttaccaattccttgccagaatgacccgtttttccctttaacatctctctcaacattgccaaaatgattttgttttgttttgtgtgtgtagagtctccacagttccctcactactcggaataattgtaagtcacataaataatgacctatattggccactgagcccaaggcagagttcaaaggacacatcaaagggaacaaaatgttaagatgactcctgaaaactgtggtcgagaaaactggcaaaagcagaaaacacaccagaaactcatctgtgttagagtactccaaagaaccaatgtgtgtgtgtgtgtacacacatatgtaaataatgagatttataaggagttggctcacaccattacagagactgagaagtcctgagatctgttctttgcaagctgtagacatgagaaagccagtggtgtattttgaagacctggaagctggagagctgacagtatagattctagttctggtctgaaagctgagagccaggagtactagagcagaagattgatttcctgactcaaactgtcaggaagagtgcaaatcttcccttcttgcacctctgtgctctactcaggctctcaagggattggatgatggcccacacacattggcaaggacaatctaccttactcagtctacctatttgaatgctaacctctttcaaaacacccacacagacatacccagaaataatgtctaaccagatagctggacatgtctggttgacagttaagttgccacttaaaattaactatcacaaagcacactggtggtttagcatctgactgattgattagaggttaaatcttatctctatacttccttgtgccacagcattcccgtatataaagtgagaattataaaaatcaatatttcaaaacatggtaaataagctcactgcctgacagacaataggcacatacacatattattttatattttgctattatacagctccatagaaatgttattttgttgtacatatatatatatacacttatacatttacaagtataattgttttttatataataggtactatttttgagctgcaattatgcattaggcaatgagatagaacaaatgaataaacacatggttaggccatttcttgtgttgctataaagaaataccatgctttccataaagcctgcagaacatgaagaactaacctctttcctttatgaaagaattaaacctcttttctttataaattaataatatattaataagttaataatatataaagaaaagaggtttaattttttaataaagaaaagaggttaaattcttcacattctgcaggctctatggaaagtatggtgctggcatctgctcagcttctggggaggcctcagggagcttttactcctggcagaagacgaagctggagtggcacatcacatggcgagagcaggagcaagcagggagggaagagccagatctcgtgaaaactgtcatgaggacagcgccaagccatgagggatccgcagccatgacccaatcacctcccaccaggccccacctccaacatgagggattatactttaacatgagatttggatgggacaaatattcaaaccatatcaaagcagaaaataaaataggaatgaggttctactttgccaataagctactgatggtggggaaattatgcaattcaatataaaattccagaaacactgacaagacagaccagttttttctgggacagtcctggtttctgtgtgttgtttcagaataattattaatagttgccccctctcttaagagtgtcctggtttgagcaattaaatgcccacactgatgttcctttgcagtaggataagcctgttgggagggaaaatgtgcttagggtacttggagcacctgatctatgtggggaggcagtgcaggaaagttttccaagagaggcaaaatctaggttgatagttcatagatgagtgggagtagctgtgtgaaaaatgaggcagaagcacagtaaggagctctaatttcaaagggcagaatagcaagtccaaaacacagcagagtcaggagaaccggaaagaaattaaaacacagaaagatcctaaagtatgaaggagaaagttgggaggaagagtcaaggattagacacagcccagaaaagcttctcccacaaagagagaccagactgtcaagtagactggcactctcagaacagatattcagaaagaagacattgagagtcgattggatacagggaggatgcagatcccaaggctgaaaggggaggaagctgggaactgtgcaccaagttgccaagcaccaggactcattcctggcttcaagtggctcccaggaaggggcgagtgaaataggcatggaacagcccattcttatcacagacctctgagatcctagctgtgagagaccccatgagccccgtggacatttgagttgacaggaataactgcctagagtcttggcagagacagaattccaggcagcatggatcccagagggtctggtgcgggaacaactgcagtggagcatggccatggactcccatcccccaagactcaccatactcctctaggtgggtttagagtttgttagcagctggactgggaaagagcagggctgtcttacccatgggatggagccagtcttatctgaacgacctcttctgctggcctctcccagggtccctgccttgccacacatatttgcagaacagcctcagctgccctgctgaaatgcttgccagtggccaccaccatagctccttcactgacagcccccaccttcctgttggagcacttttgcagatgaacctccaccaggatgcctccacctgtacccttcccccaccagcacacactcacctgcagcctcccactgcttccccactggtgagcacacacacacacagaaacgagctgccaccttaccagcacacactcaccgtggcctacccctgccaccttgctggtacacacacacagggacccatcactatcccaccagggtacacatgcctgcagcctctctcaccatcccattggtgcacacacacccatgggccccaacctactgccacacaaatggccccccagcctactcactagtgcacacttggctgcagcacccccccaccacccactgcagcacactctcccatggactcctgctgccccactgcagcactttttgttggcaacccccatgggagtattgttgtcattggactgggaacaccttggcccctccagtgcagcaggtgtttgacctcgaggggccagaaaacaaaggtacgagcctggtcctaggtcctgagggttacaacacacaaaccagaagtgctgagctgagccttggccccctgaaagcatccagaaacaaaggcaattgactaaattcaacttgtgccacaaacaagccctcaagagtatcaaagaacataaaatctagaagccctatccaaaggataacaacttcaaagattaaagaaacatgacttcaaacagatgagaaagaagcagtgcaaaaattctggcaactctaaaagctaaagtgtattcttacctccaaacaactgcactagctctccagcaacggttattaaccaaactcaaatgatggaaatgatagacatagaattcagattctggatggcaaggaagctcaaagagatacaggagaaggctgaaacccaatccaagaaaagcagtaaaacaatccaagacttgaaagatgacatagccattttagaaagaaccaaactgaaattctggaaattaaaatttcactatagaaatttcataatgcatctggaagtattaaaaacaatatatcaagctaaggaaagaatctcagagctcaaaaaccacttccttcaaatcaacaaaggcagacaaaaataaagaaaaatgaattttaaaaaatgaacaaaacctccaagaaatatgagattatgtaaagagaccaaacctatgactcattggcattcctgaaagagatggagagacagcaagcaatatagaaaacatatttgaggatactgtccacaaaagcttccctgacctcactagagaggttgaaatgcaaatttagaaaattcagagaacccctgcaagatattatacaagacaattatccccaagacatatagtcatccaattctccatttgtcatccaattcaaaggttaatgtaaaaggaaaatcttaaagatagctagagagaaggggcaggtcacatagaaatgaaaccccatcaggctaacagtggatctttcagcagaaacctcacaagccagaggagactgggggcctatacacagcatcctaatgaaaacaaattccaaataagaatttcatatccagccaaattcagcttcaaaagcaaaggagaaataaaatccttttcagacaaacaaatgataaggaaattcattaccaacagacttgtcttacaagaggtccttaaaggagtactaaatatggaaatgaaagactgatacctgccactacaaaaaaacacacttaaatacatagcccactaacactataaagaaacaataccatcaagtctacataacaaccagctaacgacacatgacaggaccaaattctcatatatcaatattgaccttgaatgtaaatgggctaaacaccccacttaaaaggcagagtggcaagttgaataaagaagcaagacccaactgtatgctgtctttgagagaccaatctcacatgcgatgacattcatagactcaaagtaaaagaatggagaaagatctatcaagcaaatggaaaaccaaaacgaggagggattgctattcttatttcacacaaaatagactttaaatcaataatgatcaaaaaggataaggaggctgggcatggtggctcacgcctgtaatcccagcactttgggaggccgaggccagcggatcacgaggtcaggagatcgagaccatcctggctaacacggtgaaaccgcgtctctactaaaaatacaaaaaattagccgggcatggtggtgggcgcctgtagtcccagctactcgggaggctgaggcaggagaatggagtgaacccgggaggcagagcttgcagtgagctgagatcgtgccactgcactccagcctgggtgacagagcgagactccgtctcaaaaaaaaaaaaaaaaaaaaaaaaaggataaggaaaagcattacattatgacaaagggttcaattctacaagaagacttaattatcctaaatatatatgcacccaacattggagtacacggattcataaaataagttatcagagaccctcaaagagacttacataaccactcaataatagtgggagactttaacacctcattgacagtgttaaacagatcattgaggcagaaaattagcaaagatatttaggacctaaactcaacacttgaccacatgtacctaacagtgatgacagaatactccacccaaaaaaatcaacagaatatgcgttcttcttattttcacatggcacattctctaagatcaatggcacactcggccataaagcaattctcaacaaattaaaaaaatatgaaatcataccaaccacattctcagaccacagtgcaataaaaatagaagttgataccaagcagatctctcaaaacgatacaattacatggaaattgaacaaactgctcctaagtgattttggggtaaagagcaaaactaaggcagaaatttaaaaattcttcgaactaatgaaaacaaagatacaacatatcagaatctctgggacacagttaaagcaatgttgagaggaaagtttatagtgctaaatacctatatcaagaaatagaaaagtctcaaattaacctaatatcacacccagaggcactagaaaaacaagagcaaatcaactctaaagctaacagaagaaaaaaaataaccaaaatccaagctaaggtgaatgaaattgagatacagggatccatacaaaagatcaatgaaacaaaaaaaatggttatttgaaagaataaacaagattgataggctgctagctagattaataaagaaaaagagagagaagattgaaataaaaacaatcagaaataaaggtggcatttcctctgaccccacagaaatacaaaaaccctcagatactatcatgaacacctctctgcacaaactagaaaacctagaaaaaatagataaattcccagaaacatactaccccctgagattgaaccaggaagaaactgaaatcctaaaaagaccaataatgagttccaaaaccaaatcagtaatacttaccagccagaaaaatccctggactgaatggatgcacagccaacttctaccagaggtacaaagaagagctgataccactcctactgaaattattattccaaaaaaattgaggagaagagattcctccctaattcatcttatcaggccagcatcattctaataccaaaaactggcagagacacaatgaaaaaagaaaacctcgggccaatttctctgatgaacatagatgtaaaaatcctcatcaaaatactagcaaaccaaatccagcagcatttaaaaaagcaaatccagtataattctagctttattcctgacatgcaaggttgattaaacatacacaaatcaataaatgtgattcatcctataaacagaactaaaaacaaaaaccacatgatcatctaagtagatgtagaaaaggctttcagtaaaatttaatatcccttcatgttaaaaccatcaacaaagtatgcactgaagaaacatacctcaaaataataagtcgtctatgacaaacccacagccaacatcatactgaatgggcaaaagctgaaagtatttcccttgagaatcagaagcagacaaggatgcccactcttgctgcttctattcaacatagtactagaagtcttagtgaaagtatttaggcaacagaaagaaagtaaaggcatcaaaatagaaagagaggaagtcaaactttctctctttaagacaacatgattctttacctagaaaacccgatagtctatatctaaggcacctactagtgataaacaacttgagtaaagtttcagcctaccaaataaatgtacaaaaaccagtagcattcctataccctaataacatccaagctgggagtcaaatcaaaaatataatcccatttacaatagccgcaaaaaaatacctaaaaatacagctaattagggaggtgaaagatctatacaatgagaattatacagcgctgctgaaagaaatcagagacaacacaagcaaatggaaaaacattccatgctcatgcataagaatcaatactgttaaaatggccataatgcctaaagcaatttacagattcaatgctatttcatcaatgtaccaatgccatttttcagaattagaaaaaactattctaaaattcatatagaaccaaaaaagaacccaaataggcaaagcaatcctaagcaaaaagaacaaagctggaggcatcatattacccaacttcaaactatactacaaggctacagtaaccaaaaaagcatggtactggtacaaaaacagacacatagaccagtaaaacaggctcaagaacccagaaataaagcaacacctaccatcatctgatctttgacaaagtctgcaataacaagcaatggggaaaggactatgtagtccataaacggtgctatgataactggctagccatatgcagaagattgaaacgtgaccttttcctttcaccatatacagaaatcaactcaaaatggattaaagacttcagtgtaagacctagaactgtacaaaccctggaaaaaaccctagcgtataccattctgcacataggctttggcaaaaatttcatgatgaactctccaaaagcaattgcaacaaaaataaaaataaacaagtgggacttaatttaagtaaagagtttctacacggcaaaagaaattatcaacatagcaaacagacaacctatagaatgggagaaaatattcacaaaatatgcacccaacaaacgtctaatatccggaatttataaggaatgtaacaaatcaagcaaaacccaaacaatcccatttaaaaatgggcaaaggacacaaacagacgcttctcaaaagacatccacacagtcaaaaatcatatgaaaaaatgctcatcatcactaatcatcagagaaatgcaaattaaaaccacaatgagatatcatctcacaccagacagaatggctattattaaaaagtcaaaaaataacagatgttggcaaggttgcagagaaaagggaaggcttatacactgctgctgggaatgtaaattagttcagtgtggaaagcagtttggacatttctcaaagaacttaaaacagaaaccaccattcaacccagaaatcccattactgggtgtatacccaaaggaatataaattgttctaccaaaaagacacatgcactattcacaacagcaaagacaaggaatcaacctaggtgcccatcaacagtactggataaagaaaatgtggtccatatacaccatgaaatactatgcagccataaaataatgaaataatgtatttttcagagccatggatgcagctggaggccattattctaagtgaattaacgcagggtcagaaaaccaaataccatatgttctcacttataagtgggaactaaacacttagtacacatgcacacaaaaatgggaacaatagacaccagggcctacttagtgggtagggggagggtcaaaaaattacctatcagatactatggtcactgcctgggtgacaaaatcatttttacaccatacccaggtacatgcaatttacccatgtaacacacgtgcacatgtactccctgaatctaaaataaaagttgagaaaagaaaaaaaaagttgcaaaggatgacatagatcagtagtggtcatatcatgagggttcggaaaatctgaatcaatgtactttaagggcactaaaaagccaaggaagggaccctgtttactaagggtaggcaatggtagtatgtgctgtggatgttggggagctgtgaacctagagaataaagggcttgttttatttggaagctcttagaaactgttgatttttacaactcatatcgttttcttcacggccttcctcttccagaccatggaggtgacatggctaagaactcaaagcatgcagcatccattttgcccttgagtttacatttcagcagaacaattccagaatgaatcattgcctgcacaggttgttggttatgcccggtttacagcccattttcaaagctcctttctactttatggtccagactgagtttgcagagatttatgtggagatttcttattctctttgaaaaatagaaaatctttcaccagcatatttttctcactcagtgaggcaatgctgaacctccttgctgttattctccagaaagccttttctaccaccatcaaattgaccattttcatttaagatagaaagggaatagttaagaatggaaaaattagttctgaaaggtggactggaaactgaacgcagcccttggaaatcagacgaaacagagaggaatcactaactctatgagacaaaaccgtgtgctctaaaatagggaactgaattctggaggattcgattactcaaaatctcctacttctaaaacctaacctaatgtggcctcaggactgggcaataagtgcttgcctacagacatgacagtaactcagtgttgggaagaaaagaaactttaaagaaaagttttgatcaaggatgcatcctgtatccaaagaggaaagttatattccgtttataaagagggagtttcacgagggaaggaatatggataatgagctgatagttgtagaataatataggacttgagagctatactatctaaattcaaatcaggatcttcaatttacttgctgtaaacagacatgcaagacacttgactttggataagtgtcttaagttctatgagcctatttcctcatctgtaaaatgaggataatcatatctcacaggattgttattaagattaaatgtgttaatatttctcaaatacttagagtaatgcttgacacagataagagcttgttaataatagtgacaaaaatttatcaataattgctgctcaagcatgatgtattctactctaaaatctctacaaattcaatttctatttctaggaaatgatttcgtctcccactatgtccctttcatataccttaaatcttcctgaaacgaagtaaaattagtaactcctagagcaaaatttattttttaatatttatgaacaaaagaattcacagtattctttccaaatctccagtgacccacctacccattcactgagtccctcagtgataaagaacatttgtccaggtggcgatggcaaggcattttggggatggacacagctgagcagggtcagagtttactttatcttaatatccctttgtctcaatttagaaaaaaaggaaagggcccagcttccagacagccatgaaaacaaaataaacaggcatgtaaatgagatgtgttttggatgtgggtttatatatattggcaggaagagcagtgaaacttatgactctactttcttattcttttttctctctcctgtcccacttgatgccaaaggagttatttttaaaagcatgggttcatgtttttgatcataatgttatggcaaaaggggagatgacctttacatttagctagtagctgttatacgatcaggaagctccaaatggtaacacttcaggtttggtcaccattttgggtatgccatagtttttttgtttgttttttgtttttgtttgtttggttggtgttttttttgttttgttttgtttttttgtttgtcttcagttaaatagcacttaccaaacccgaacatgtccaaatagtcatttatttcttagttcattgaaagaatatttattccctaccaaattctaccaaagcgtcttgcaagacctccatctggtacagaatcatatagagaaataagttaacatactaaatctttaccaaagcatgtaggtgttcacccaattctgtgcatcaggattgagagagaaaacaacagatgaaagtgtctctatgtcaaacatacagaatagaaatattacctatagaagcaaccagtgggatgcaactctgcttaactaacaaacataggcttataactcaaggggttcccttcagcaagagaagattggactcttgtaattcatacagtgccttaatgcttcaaaataggaattctcatttttgattattctgtgggggttaactggttctaggccaacttctagagggaaaaatgatacattcctgccaaacaagagcaaaatgctaattatgtatgttttgtgtgctaatgtttttttcctgggaaaagaggaaaatgaaattacttctgtggtctgatatgttttaagtccttatctgagagactactgaaagtattgtctatattatcccacaattctgacagaaaactggacattttagtaaatattccaaaccttctttgtataaatttaaaaacatggataaatcttctcatgccgctaaatttactttttttttggatatttagtggtgagtggtctaaaactgtctattatactcatataaaatatattctgggggaaaagaatttttgcacatgaaatttgatctttgctatagtttggatatttgtcctctccaaagctcatgttgaaatatgatccccaatgttggaggtggcacttaatgaaaagtgtttaggttggggggtgaatacttcatgaacagaataacgcctttcctgaattgcacttagtaggtgtttgaggcagttgtgggtgaatgagttctcactcttattagttcctgtgagctatttgttaaaaggagccaagtacctcttctcctcttctccctctcttctccctctctctctcttactccctccctccctccctatctcaccatatgatctctgcacatgccaactccccttcaccttcctccatgagtggaagcagcctgaggctctcagcaggtatatattccagtgacatgtttcttgtatagtctgcacaactgtgaaccaaataaacccttttcattataagttatgcagcctcaagtattccttcatagcaacactaaacagactaagacaattttcattactaacgttttgctgttaaaaaaaatcttaacttctgaattcccaaatctctgataaaataatgtcattctgcagggataattgaattgaacaaaactggtgttagagttgtttcatctaaaataaccaaataattcttatatttctcaaagggagagtggaacaataaaatctcatatttctgtggaaggagagtaacatttaaatcaaaatgattaatgtctaagttttatttcttaatttgcatcaacagaaagaggaaataaaagtttaagacctgcattagggccatcagtggtggctgaagaaacaaacaacctccaatatcagtggcttagcccagccaaggttttttctcacacttgcaagtccactgtagatggtcttgggcagctttcctccaaattagggacctggatgccttctgccctatggccctgccatcttgaaggactttgcttgtagctgctcagattgtggggagagagagagagaatgagagagaggggggaataaggataaggagaaagaatgaaagattgtgtagacagtcttgaataaagtaatggacatttgaattggtttaaatgacacatgactggcaaagagtaatgacctccaagtcttgatgcctttagtattttatctacaacttgttatataattgctatatctttataaatcatgtaattcctctaaaaggggtaaagaattatataaatggacaggcccaaaacacaactgcaaaagcctaatttatcagtgaagagttaatataagtcatgtgcagaaaaagaaacaaatgcattttgaataaatgataaagcaatctctctttaaatgctgctcattttaatcacctaagtacttcaatcacctaagataaatgaataggcatggctttactaagtggtccttctaatacgattgtatgatagggtcttaatcatcacctatgaaagtcaaagcttctttcacagtgtatctaactgattttagcagaggactttgtctttctacatctccttagaaatatttatgcattataagtgaagtgaaacataccaggggcaattatttataatatttaacaacaggtaagcacaagcatcgaccggtcagaatggatacagaccctagagtagcatcttggaatctcctattgcaatgggcattgaatctttgattcctggatcataaaggaggagccactggccagggtggcagtggggaacaggcaattctgagccataggcagcagaaattatttactaacaggtattttttcaatattctatcaacgtgtgcagtcatactggagtccagctcatccaagacccaccataagactccagctttaaattttctaagccatccaggattacattctggaatttgaggtttcatttccattatatattatagcttctgataaaatttctaaaacactttttcaactttttatgagattcttatcaaattattacttgtcatcttgctctgaattcaactgccctgttctcttttgtggctgctcattaaattatctaaccagttttcttagttgtttacctttataaccctttgaagggtcttgtatgaggagcaggtagctgaattttgtgttttaaaacattacatctacaatattataaatggtcaatattgtaaatgtaatgaccaatggtttggtcatatcttaaccatttaatcccatgctttctgttgtgacccctttttgatggttttcttagtttctctaagctctgacaccaccctccaaaaatgctaatttagtataacttactttctccacccaccaggtcacaacaagcaaatacacacataaacactctatatcaatattagtcctccaggaagcagacaccaagatagaactagaagtccaagagattgattggatgaaagacaaaggggaaatgaagcagtgaaatgtattttaatacaggtctgatgcctggaaaaggaaagagggaagaaaggcctgggcaggaagggcttctgactgcaatgcagctttgaaaatgtctcagccagcccatggggaaaccatagaacaaagagaactgaattgggcagaaaaggcccgactctcatcctctgctgtgctcaaccatcagctgggagtagcctagggagagcatggcttcatgtaaatgctgcaatagatcccaaagacatgcatgcatacacgtgacacttccaaattttgacctgatttatttattttgcattttaaaaatattcaggctgggtatgatggctcatgctataatctcagtgcttcaggaggctgaggtgggagattcacttgaggctgggagttcaaaaccagcctgggcaatatggtgagaccccatctctacaaaaaatagaaaaatgagctgggcatggtagtatgcacctgcaagaggcggaggcaggaggatcactgaagcccaggaattcaaggctgcagtgagttatgaagacaccactgcactctggcctgggcaacaggacaagatcctgtatctaataaaataaaataattcagtttggctgttgcatcttttcacacatacatacatacatgcatatataaggaatttactgagtttctaccctcatctgtattacatgaaagaagtacctggttctaattcctatgtccagccttgatactatgtttctctatcaacttcacttacctctaatattgctagactgaatctaagcagttttatcaaagagttcatatcctctatatttccatatttcagaaaatctttctgttgcttttgctcgtgagtggctatatggcatgttatgaaatacttgaatattgtctattaccaccccaaagtctccaagaattccaggattatctcgtagtgtaaagtattactaaggagaaagggcttgcttttgttcctttgtacataatctaagttttctgcttgaacattaagagaatctttaagaatctttgaaatacaaacattttgtcagtgtacatttatatatgagccctcctcttttagtgtgttttcatatgaatcttacttggatgtttttaatagtctcattatttatagttttgagcttctcttttaaaagtggagattattttatatttccaataatcgaaaaatcacttctgtatccattgtttggttccattgcctagatacaacagctttagcactattgctttttttctgaaagttcactggaaataatctaatggcttccagtgtcagtgttcataggttaaaaaatcccaagagctacttttctagccatactgctaaatcctacttttaaagaatcatcctaaaatttgtcaccccattcctttacttctattccccaccagtctctagcactcatctgggaagcagaaagaggtctcttaatcatctgtattttattaagtgtctaatatactataggagaagccaattctctgtttttccaacatttcaactgagtatcagaatttgcggccaaatgaattgcagcaaaccattttctaatagaagaaaaaaatgcctcaggagttctataatgtcccaatcagagcaaacaaaccttgggagtttagggtacttatccaaacaactctcccaccataaactaagtgcaactcaatttatctcaaaaaagacgaaagggtgagtcaacgtggctgtaatttgaactttacagttctagggagtctccccatttccaacctgagacttagaccactaagctatccccccaggagatttatttgcttctttaatttccttggttaaaaatatctgagtcaccataaaccaaatactgcaggaatcttaacttttaaaagagcattaaaaccacactgattgatttggcgagatgttggaaactgttttgttctctgacaattatgacggactcaacttggctcttggaataccaatgaaggagaatacaaatgcaatatcatcttccacatctgagcctgagaaagctcactgttcctcttcattatttcttaaatggacctttccagctgctcctaaatatgtacacatgtcaagcatttgagaaaagtgaccaaggttttacctacagtatttcttatgagagtattgaggacagcattcatttattcacttattcatcaaaaacgtattaagtgcctactatgtttattatttccagtgcacatgatacaaagatgaacaagacctaggcccttgaggacaatcaaaatatattattgtcataataatgacaaagaaggggaagaagagaagcagaagggaaatattatttcgccattttacagatgttgaaacacaggcagagagagataaaggaaagtgccttagctcacaacatttgtaatcagcaggacccaaattctaaggcttcagttggatgagtgcacaatcacctcatgtactattgtattattccatcttcatactgctatgaagaaatacctgagactgggtaatttataaaggaaaaaaggtttaatggactcagttccacatggctggggaggcctcacaatcatggtggaaggtgaaggaggaacaaaggcacatcttacatggtggcagatgtgagagcgtgtgcaggggaaccacgctttataaaaccatcagctcttgtgaggcttattcactataatgagaacagtatgagaaaaacctgcccccatgattcaattacctccaactgggtccctcccatgacatgtggggattatgggagctacagtttaagatagatttgggtggggacacagccaaaccatatcacctattgtctcaatagaagactgattaagtacatttaaaaggaactcaatacaaccacgcttgtctcttgattcagctggagtcacagtcgccaccttgatccaagagttctatcctgtagacttgagcttttccctttttaagtctctctctgttacttttgatggtttcaagagtgtttgacatgtgctcagacacaattttttcttgttcctcagaggctgacataacatctgtttatgacatggctgaaataaggagggtgtggagtcagatacattaagtgtgtactttggtgaagaaaatgatatgatcataatagctgtgagaaactttattcattcagcacacatgaaacacattctagcatgtgaaaagcatgctactgagcataaatcaaatgccattctgactcctgagaaacacacagcctagggagaaagaggcaccttaataccaatattatagtacaaactcaatgcactaagatgatcattcattctcgatcacttggacagtcctgggtcatgtctgctgttgtgatataatgactaatagggccaactattactcttggaaatacccaatgtggatggtaaattatacagtcaccctagcagtaagagaagcacatttaaagtattatggaaagacaataagagagcaactaattttccacggggggaagatctggtgctctaaatgagtttttctgtggtttataagaaatcgctattttgagtttaaaccgttaaccaaattactctgttaatgttctggctgacaaaggaatatccagaaaaaaatacgtatcagaaagcatgtctaatgcatgaattgtgccttttgttaaattgaacaattccaaaaagccattttcgaatacatactacattctagaccctgcactaatatacatgcgtgagtaggtcattgtctttctaactgaattgtaataccttaagtgcagggactaaaacacacaaaaacataacacagtaagtataaagtatgtacagagtgttgagtgaaaagatacttaattcaagctacagattcagagacttctggaaaaaacagctgaactgagtcttgaaggattagtcagaattaaggaaaataaaaaagaacaattcatttaaaaagtcaaagagtcaaaatcggaatgtaattcaaggtagaaataatagtggcccacgcaaccaccatcagacacaaattttgcagttctttggaggaaagggtgcccactgcaaacaacagggatttatacaggacagctgagctggagctagaccatgatcaatgtttagggctaaattgagccaagtcccaggcacacccaaattttgaagtttgaattcagttcacagggaaaccatgttatattggaagtcactcattaactaaattgaatctatttgattacttaaactctggttctaatttggaaggatgcctctctctactcccatgctatcgtttcaatttaattaattcaaatagtatatcaaaatgtctctgatttctttatttcctggagtttacctgaaagtcaacagaaagtgtaatcaattgcttcatcagatgttttaaatctaacaaatatctttctatatctgttttaccatcttttaaatacactgagtaacttgttgctgaatactgaattttctgatacttaactgatatttaccctatcttcataatctatcaatattgagtagtattaattatgtaaatagcttagtttgggactgactcatgcttaataaggctaaattcacagccttgtttgaagatgtttataaaacccccggtggcagtgaggggagatctacaatccatcttctgcatcatagctggaaagacaccacaactttctacataaagcccagcattctttcagaagcccctcatgagttaagagttgggacatgagggtagaacaataggacagtagagaaattgaaattctgctccgcggcttttttccctctgctccagaacactggagttccatgcaacatttgatggagtctaggagacagcgttcccaaatagggccccttggcatttcagaaaagagcagacacaggaatgtcactcttatcttcccctaaccccttccctgaagcaagccataaaacgtagcagacttcttctaaagtaagtcatgagaccttcatttcagaagcatcctccctgtactcaggaaaagaacatccttattcacaaagacacagagacactaagaagaatctgaacaaacaggctttgctgcagttcccctcagttgaataccagtaggtcacacccccttttgtccttccatcatctctccaggagtatccacttcttcatgaagcagcgtaaaaatacacaggtttccctgtttctctctttgagacaaattgtgctttccctcatttctgaaggctcccatatcacataagactcctattaaatcaatgtgtatacattttttctttcttcttaattggtctctatagggatctcaaccataaagctagccaggagtgagaaaagtagtctttcctcccctacacatttcactttttaaaattctgctgaccaaaaagcacagttcaaagccattatcctagctgtgtcagcatgtctgcttctgacaattgagctatcttttcattcaatgttgcctggtagttaaatcacattaggatgctattttaagtatgttgaattctattttagttggtgcgtgtgtgtttttaaactgtacctctgatcgacttgactttactccaatatatttcatatccaatgttgaattgttgcagagaaatactaaactgcaaaatgtcaatagcagaggaactaatttaagaaagaaagtattaaggtaaactggggtagcagcccaagctctgggctgagaatcaaaagaccctgtttctctttttgcctctgccacagaataactaagcaaggttatgaaatgaaggacttggactatttccctaaattccactgcagccctaaaattctgtgatcaaatttgggatataaacatcattcctttttgattggataatcaggaaaccatcagcatcacagggtgaacgttctggaaagaataaagatatgctctgtgaattcttttgtctgtctctgcttctgttcatgaatgcagtgaagaataaaatgaagtcaattagcgttctagaaattccagacgatgagaaaaaaacaggagagagtagagaaggaaactagagcttacagatcacctatgtgatgtcctgtccactctcagaggatactttctcatcttttatcccatttagtccttacaacaatcccccgccccccaccgcaaggtaaatgacacgatgcccaatttagagataagaaattttggaatctcaataatgcctgctcagggaattgcagttcataagagactgggctataatcagaagacaggctgtgtgatttcaaatcctatggcttgataaaacatgctaatttttttattaaatgtgacaggtgggtaagtctctgtcattcgaaatatggatataaattccacatgtttgaatgcctggtacaattgttaaagtattaagctcagaaaaaaactttcgatttgggttatgatttttggtgaggggaatcacatactttactcaagctacaggaatatcaagtttcattaggtcagggttaatgactaagatactgtattaattcattttcacactgctataaaggacttccctgagactgggtaatttataaaggaaagaggtttaattgactcacggttccgcatgcctggggaggcctcaggaaacttataatcatggcggaaggcgaagcaggcaccttcttcacaaggttgcaggagggagacgaatgaaggaggaacttccaaatacttataaagccatcagatcttgtgagaactcactcactatcacgagaacagcatggggaaaacgccccctgatccaatcacctccctctctccacaggtggggattacagggccctctctcaacacgtgggaattacaattcgaaatgagatttgggtgggaacacaaagccaaaccatatcagatacctagctgaacgcaggacttctaaggtcttggtctaattgcatatcatttaaaaatatatagtgattcattgtactgaaaactattttatgctgaatcatttattaaatgcttcgttattttacttaaaaagaaggcctgaactgggaatatactaggatttcccttattcgaccataaccatgggaagtcttgcaggctgaatgggaacgtgggatcacgcactggacagcagcatatcctacagtgtccagaataggcaaaggggaacaattaccttcttgacactggccttgcagaccaattcctctagaatgatggtaaatggtaaaaacacaccatgatctctatttcctaaaaattgcacctgattgttaaaatcgtgctcataagaattcatttccagaaaaataaaatctctcatttccagccctcaaaatctctctgtcattttacttgagagtcaaattagtggaagtggggtggagggggggaattaaatcaactccaactttccttccttcctggtagcatctcaagtgctgctcaaagcctggctgactcttcccatagttgcccacctgcttaatccagcaacactcttcctgggctcccagggagaatggggaggcctcttctgatccccactgtctgtcttcgcagtcaccagcatccagaactcagagattgtaagccccaccagctgcagcatctttaaaacttctgtattcaattttttctgatacaccattaagaacaccctttttttctacggtaattagagggaacagagctcaactgtaagaaatcaagccaatggctatgattttagggaggagcaaaggtgaagtgtcacagagtaaaaagacgtgaccattattgatttcctacccaacctcttggtgaagaggttgcaaagaaagtaacaaaaaagagatcaagccccaagtccctaaatatatatgtataaattatatattagaaaaatgtatatacatgtaagcatgcatatacagatatgcatgtatgtattaatatatattgtttaaaatcagggtcttttctttttcccagtattgattccccagtattgatcagggtcttttcttttctccagtatgaaaatgaaatacagtgctgagaataaactggagatctctgccagagttataaaatgcaagaaagacccttagtgggagatgtatgagggtggatcccaggagcagggccgggaaataatagacactgaggtttgtttctctctgcaaaacaggacttcagtgatacagcgatataatactctaagatattttattttcaaaacaagacataacccaactccagctccctaaggagagccctacttcccagcgctgggtctgcatcaggagccctggcatttcctctttagcagggagtgcagccagcaaaacaatcaagctgtgattgggagctgagcgcagtggttaattaaggctgcatcttttattctccagggcaattcagcacagcttgaatgagccccagagccagtctgcggtgggaatgtctccccgggcagtgggagaatccagtctcaggggctgtctcatcagcatgacaatagccccaggatgcacttggactgatgtaatggccagagttagggaggggggatgaaagccttgttgcagaagcctggagcgtttgcagctgactggggctatttcagtgcatgaaattccttccctctttcttccttttataagagatgtttgctaattggtagagctcagaaaacaatataccattaagaatccctttccttcctcccaccccccactctcattttttaaaagtctctgctttcttgcttcactggaagtctcaacttttgttctgtggtttgcatgaagtcttaatttttcattctctttaagagggaacttataaacaacgatttactaaaagagactctgcaaccgattcttctgtatcaggggttcccaaatacagccccccccccaccaccaccacccctactttgagaatcttggctgtggtcctgctacaactcatatatttgcctcgtttgttacacattgatacaaaacattttggaaaagtgactcacggaaagttagtctgattttgtattttgtattttctattttttttaattacaagatcctgtttgaattaattgaatcctttaagctgacaagctaatggtcaaaatgaagacagtataaggaaatgtcagttgagaatctgggataaatgttgtttgaccctgccacaaattcagtaggcgaccagggtaagactttgtcctctcctctcctgtttgggtctcagtttgctcatctgtccaaagagataagggagctcaatgattcctaaagtccttcttgtgctatcactttatagctcattgagtggagccatactttcttaattgatagaagctgtaagctctgatataacagaaaatgtgttgtgtgttcattctctaaaagcacaagatgtccatagtccttctacagttttgaaaattaatgctcttaatgattctggaagattttttttagtgaagtaggctgttatctggaaccacaaaagatatgcacggattctgatgcatctcatctcagaaatcacctgagcaatgcacagctgattaatagaaataagaacattactttaggagaatgttcttcacgttcccaagcatgaagaactccttttcctactctaccttattccttctcttctttccacttggacagaaccactggagagactttagaggatcttttaagggtttcacacgagcaggtggaagaggctctggacacatctctgctcacattctaacaagtcactttccactcatagtctttcctttgtatactttgctgtgaatcctgccacattgggagcatccttagctcaaccttacttctaaattccattaaatacttgtcacagtacaataggtgttactgccactagtacctcacccagacacagcatttcctaaaagcaaatacttttgtaagtggtttagaagtaagagtttattctcaaaatcacaatcagcatacacaccagcttccttcttaccacttccgtcagattaggtgagttgatcataattgaaaatatgataccatctttcccccagtatccaggtctttcatgaggctaacaagaatctttgtctaaaaattggaaggttgaataaaacatgcgttgggggatttgtgaagacagagagtgtccatattgtggttctcttctttgggctgttgaaataaacacttcgacatctctcaaggtgttcctgtaaaatttttgataattgtctgcagaactgacaattcaattcatgaagacgaattcttcctcttgttattttctgagatttaacagaagaaaaacaaaataatagaactctcagaagctataaaatctacatacagccccttacttaaaatataacacctcaaccacaaagagccaggacactgtcattaaataatttcagttctggggttatttcaggtgagccaggtgcttgatcttgctgttcctgtcttctcccaaagcagtggaatttcagcagattcccattctcccctcagcaaagatcccggtcacagtagccagatgaaaagcctctttgaacttggtaggggtccattttattatcattattataaaactttagaaaagaattcagcttgcttgatacttttctcagggccaagtctgaggttgagtaaagggataaagaccagcatctttttaaaggtgccagactggtcatctgactttttttcttggcaaggacacacacacacaggcacacatacacatatgcatgtacacacacacctgcatgtacatgatgcacacatacacacatatatgcacaaacatacacatgcatttatgcacacacgcactctctctctcacacacacacatccaaacagccacagttatcttctcaaaagagaaagagaatgtccctgtagtttagactgttcgcagcggggaatacagtctggtaaaatgaagactgcacaccccctccccctgaggcagccaaagaaatctttgtgcagcccaggtgttggctgcgtcctcttcactaacatcctgtcttgaattattcagactcattcattatgtatcccacatagacacaattaaatcgttaactttcccatcaagagaacagcaaagggacagtagcactccgctcctccttcctccccgggctgagagccgcctggtggagctgctgcaaaggggaatggtttgcaaagaggcagtgggctgggggcactctctgctctgacagctggaaccctactgcccagccaagctattcagccacataagcacctctcctggatgtttccaaggtgggtgggggtgctaaagaagtacggagcaattcaaatttagtttaggggtcttcgtaaagtctctgaggcatttcaaagctgcagacgctcatctgtctaggtcagatgaccttttgatcttacttaaattctgcggacattttattttacgatgagtttgtgtttagattcacaggaatctgtggaccaagactccaaatctctgccaaaaagactccagggagataagcaaattctcagccttgtatcttcttgagacccaacgatgagattgagccaaaggacattcaactaaaaaaaaaaaaaaaaaaaaaaaaaaaaaaaaaaaaaaaaggctgctattgtactatttcttccaacaggtcttagtaaaaagtggcttaaacagaaaggaccattgcaaaagagctcagggcattaaatgataaaattataccaaagttaggttgggggtgggagtgggaaagagagagtttccatcactttcgtaggtctccttgccctgcttctctgccagcaagtacctagaactttgtgctagagctttaactggctccccataccaactaagtcagtcatgtgtcattgtccactcctgctgagaactggccagatgcaatttggtcattattcttaggttctttgaggtggataatggtagccaccaagaagctcaaggtgggagaggtctaattatttactccacagactcattaccagttataattaaaccaagtgtcagatcaaatctgtctcacagagagatattaatataaacatttattagcaagtgggcacaaagaaagcttacagaaactgttctgggagctcaaggaagcttccgtgccctgtctttggaggggatctggccaccaccttctatgaaactttacccaaggttgacataataatagccaggctagaactcagtcttccttataggtggtccccagtaaccagaaattctctaaactactggttctcaactgggcaattttgccccccagaggacatttgacaatgtctggagacacgtttgattgacaaaacccagaaagagacgaatgagggtgctattgtaactggtgagtagagagcaaagatgttactaagcatcttaacaaatggccccaaatgtcaatggtgccaaggtttggaaaccctgctcaaagcagatgactggacataaggcctttcagatattcatcttaggttctcagtgcccatatgaaggtctgagctggcttctaacagcctctacccacaggggtagccaggtctttaaaatgttttaacccattcacctctctcaagtgctctaagtctaaatcaacatcccttcttaatatccctcatgctgattaacaagctactaatttacaaactggtaactagcaaaagtctgatgttgagcacagatttctatgacagacatgcttacaacatacacttgtggaatttcttttttctgacatattgccagccaaccatcccttgggtgtggacctctgattaaaatgataatgtggccaggtgcagtggctcactcctgtaatcccaatccctttggagaccaaggcgaacaaatcccttgaggtcaggagtttgagatcagcctggccaacatggtgaaaccctgtctctacaaaaaatacaaaagttaaccgggcgtggtggcgcatgcctgtaatcccaggagggtgaggcaggagaacgtcttgaatccgggaggtggaggttgcagtgagccgagatcatgccactacactccagcctgggtgacagagcgagactctgtctcaaaaaaaaaaaaaaaaaaaaaaaaagccagtgtggtagcgtgcacctgtagtcacagctacttgggaagatggcttgagcccaagggggaagttgcagtgagacaagatcgtgtcactgtactccaggccaggcggtcggtcacgcctgtaatctcagcactttaggaggccaaggtgggtggattacctgaggtcaggagtttgagaccagcctggccaacgtggtgaaaccccgtttctactaaagaaatacaaaaattagccgggcgtggtggcgggtgcctgtaatctcagctatttgggaggctgaggcaggagaattgctggaacctgggaggcggaggtcgcagtgagccaagatcacaccattgcactccagtctggtcaacaagagcgcctcaaaaaaaaaaaaaaaaaagaatataacttgggattgaccttttgtttatagtccaatgaccttaaagtcttttccatgaaaattatgtgccactattaattgctggaatgaattattcactgacaaatgaaacctttaaagcaaaagcctcattttacacaataatttcagcaacttttcccttcaaactttaacaaaaacttctaagtggctaattacagagtttatgccccctgactcttttttttaaaaaactctttatctttaatgtagatgccaacaaacgatggcattctcagcaaaaagacataggaaggatatgtgtataagctctcaaaaaggcacaagcttcattatatcagcatctgtatgaagaaaaaggggagacaatgtgctttagttttattaccaggatagagaaatggaagatccatagtctttgaaggtgtgtacatggtaggaactcaatgaaaataaatgcaaactccccaaagggcagaggcagaatcaaaagcaggcatgggatgagcagagaaatgcagggagaggcatttggggaaacaggaacagaatctaggacacccttgcaaacattgctgagctctaacatctgccgtggactgcctaaatgcgtgaggatgaggcagacccttcaaggtagctagcggatgaataaacgaccttgatatcagtcacttacctgagttcatttttaattgtttgctttcattccttgcctctggtgactacgataataaaaaaagaaatattcattgcgaagagagatgataaattgattgatagaaaaataatttttgcaattgagccttaacaagagttaaaataggttgaaaggcatcaaaccaggacctcagagaactagaaggatgcagctgaaataaacaagggactgtgctggagccagctgcagcattgcactgagttccgttacaccatgacacagagtcaatgggcagatgtaaattagcttggagtggcattaccctgctgtggtcttaaatgcctactttagtgccagaaagcctggttcaaatcctagctctgccactctaccagctttgtaatatttgacacaagaatttatactctatgaggttagggggcagtacatgtttgtttacaaaggtatctcaagtgctgagagaacagtacctggcagatcacaggtatgcaatgaagaaatctgttaaatggatagtggaatatgttacctctatgcttcagtttctgtatctatacagtgagttatttagaggataaccatgtgaatggatcagtacatgaaaagctctaagaacagtgcccaaaatatgcaccaaaaagacagtcaacttccattactatcggtgcaatgcataagaggaagaaagttggagaaacgtctgtatctctcttcttaggggggtggtctcatcaaaagtgatcaattcacaggcatgtctagagaaatagtttccccagaaagcgcagccaaaataaggaattcttagatttcaagcacttgctagagacatgagaatttacttgcaagaaccagacagatacaaatcatgagacagatttggaggaaggctgcctaaacatctaagctgaaatgactgtggctgtcttcctggccaaggctggggccctagagaacctgagtgatttaaaatattgtcttgacttcatgttcttgacaaattatttttcaaagggaaaatttcagtatgcatagaaacatccaaaatgagcccaggacacctgttagttatgagtgtaggcacttaaagtaactggcatggattctcccttttggtccacattctggtcgggcaaaatcaaacatttacctttcacttttgcatgacatatcaccctacatacacctctcaacacaagtccattagccgtaaatggtcccaaatgtgggcctttctgaggtggtaacagtagcaccatgaaaacagtgatagattctgcaaatatctgttactctatccgcagcctccactccctgcttgctccctccccatttcctaccatcttgaataacttagcttctttcatttgctagtatattaaaactgaatgatcacagcttatcaaacaaagagaaaatatgcttgttaaataataacaaatagggaaaaaagacattattaaagaggtgccaattgtgatttattttataactctccctttccaaaataatgctcataatgatcagaatgtaaatataaaaccacaagaaaaaatgaccagatactagtgacatccagcatgtgctttacacttgtagaatacttcaattagaatagactctaaaatacaaaatagttcaaccacctctcacccatgtattcattgcttcatgtgttcatcaaatgtgtattgagtacctactatgagccaagcatgtaccatattccaggaacatcaagctaagcacaacacaaacgtgacctaaaggaatgtactatctagagcagacattggcaaatgtctttgctaaagggccagagagtaaccatttttggctttgcagacccaagatctctgtcacatcagctcacttctgccattacagtgcaaaagcagccatagacaatatgcaaaacacacaagcaacagacttggctatgttcccataaaacttcgtgtatagatactaaaatttgaatttcatataattttcacgtttaaaaatgccatccttcatttgatttttgttccactattttaaaatgtaaaaatcatttttaatgcacaagctacacaaaaagaagtaataagtctgtttggcctgtaggcagtgtcgacatctgggctagaggcaggaatatataagaaatcacaacttgctaattgattatctgaataagatacaaaggggttgtgaatagatgtcaccatttccttataaattctactgacaatgaaataatagaagatgaaccttcacttagcccactatgcttcctaaaatcatggctacacgatctcaggtacaggtagagagccctgctgctgtttccactccctaccctgatctttaaatgaggtccttgtacacaagcccatgagtcttaggtcgcccaggtggttatggacacttgactcaggacaaagaagccttgaagagtctggagagtatctgacatcataatgaattgcaaatataaagaatataatatgaatgaaaaaagtaactgggctaaacctctaggtgtcttagaatttgaatcttgaccaaggaatcaaaatcattagggcaagatggcatgattgataggctctaagatagtatgctgtgtattctaggaggactataaagaagtcgaatacctaactcaagaaggggtgggtgcagggatttggtaatagtgggtaaggtttgaggtaagtcccaataggagacatttgaggtacgtttggatataagtagaaactggccttagtatttttggcagtgacaatagcctgatgatttggggtgaccacagataactcaacctgtctttagggaagcacatgtgatgggaaggtagaggaagagagattcagaggcaagagtataaaggtcttgcatgacaggacaagggatctggaccagaggagacacccaagaaaattttaaacaggaaaataggatgatcagatttgtgtgttaagatggttaactgtggccacaagacagagaatggaatcacatgcaaatcagaaacatgacaaattgcctgaggtcacagaattaattattgtattaatcagttttcacgctgctgataaagacatacctgagactgggtaatttataaagaaaaagagtttaatgaactcccatttccacatgtccttggaggcctcacaatcatggaagaaggcaaaaggcacatcttacatgttggcaggcaagagacaatgagaaccaagtgaaaggggtttccatcagatctcatgagacttattcgctaccacaagaacagtatggagaaaactgcccccacgattcaattatctcccacaagttccctcccaaaacacatgggaattacggcagctacaattcaagaagagatttgggtggggacacagccaaaccatatcaattacagaaaaacaactataaacaaacaggccaaacagattggaaaaaggactctgataccttttccagcatgttccccttgacaaattttgttctctgatctccagtacctggtcataacagaagaccttcaaggagaagaggatagtgctgactcactctctcaaacacccactcttgataatttctctaaatgggcaaatacatttgctaagagccacccttcttttatcctcctcatagcatttgattgacgacaaagtgacttgggaacaaaataaagaagcaatctgcctacagatcatacctagtcccaatgccttataaacaccagcaaaagttactaagaaaaattagagaactgttaaaaaaaagaattttaacattagtcaacattttatcattatttattcccttcatgaaatgtgcttctttgcttaccacctgaattgagaatagagggtatcaaaaccttgtttctactaaaaatacagaaattagctgggcatggtggcacataactgtagtcccagctacatgggaggctgagacacaagaatcgtttgaacctgggaggtggaagttgcagtgagctgagatcgcaccactgcactccagcctggcgagagagcaagactctgtttcaaaaaaagaaaaagaaaaagaaaaaagaatttagaatacatctaccatttctccattcttgacacattttatctcacataatctttaaaatattggtaaggtgggtgatttgattcattcctctccattcccttcatttcaccaagtcagactggcttgacaggtattggggagagagaaatggtagctagacagaagcactctatcacaatagcaggggagtcaggaagtgcctatggaaacagaaaccttaaagtctgcaggaaaggaaggacgaatctaaacctccaggttttcatcattagcccccatcctctccatgtaaacacaacaaaagaaaaaaatgagacacaaagcacaggttagaaaactgttatatttgtattgatctgtgacataacatctaagtaagaacagtaccatcactagctttaagaaaatttccctagttgctccacctctactaggtcagtgcctgtgaacttcttggaaatcaacaccaggcttttgataagaagccaaggtaagaatcagaaaggtgacatgagtcccaagaaggtctcaatcctgccagtcaggagagaaggggttacgaaagttagcatatccttgacttgagccctctgtagcctactcatggaactttgtgcatggctgggctgccctggcttgaagaaaacagaaacagcacagaaaatagatctttttattcccgttatacagaatgctcagagccacatggctactaagtggcagaattaacattccactcagatctacttggctccacattccacactgtcttcagtttgccacactgcatccagctcaaccaaggtaaagtatggtgactaattgtctaaaagacagaattggaaagagcacatcgtttcctgggcaagatactgaagactcttattgttattatttttcatgtatgtaattgagctataaaggaacattccaccagctagcccaagaagtcaccgtggtacgtcagccattttttccatcttccttcatctctctcagttcagagaagtggaagttctcccagggaggcttgatctgcctggtcagcatggccaggatgccccccagggaggagctagcatgcccaaagatcacactactttctcccccttcactcaccctgtgggtcctccaatccctttgtcagacttgatgcagcctgagggtttcaaatgaggtataggaggaaggaaggtacattatttagaaaatgggtggtaggctgggcacagtggctcacacctgtaatcccagtgctttggaaggccgaggcaggtggatcacttgaggccaggagttcaagaccagcctggccaacattgtgaaaccctgtctctagtaaaaatacaaaagttagccaggcatgatggcacacacctgtaatcccagctactcaggaggctgaggcaggagaatggctggaacccaggaggcagaggttgcggtgagccgagatcatgccactgcactccagcctgggtgacaaagggagactctgtctcaaaaaaaacaaaaaacaaaacaaaacaaaacaaaacaaaacaaaacaaatgagaaccagagtaaaaattgattctgaccagaaggcaactcctccaaatacagtggattccaaaagaggaggaacaactgggaagtcaaacaagtgtaggcagacccacaggtcatgaaaaaattctacatataagagaggtttgagactatccaggattttctgttactattcaattgtgacttacccagagacccggatgaggctgagaatctaagattattttcactcctgtccaaacctttgtttctcctagactctaccatgtccaggagacatgggagcatgaactaatcgatatgaaattacttatgataatagtttccagagtgattacattgcttttggattctaaacacaggttttgtttctaaaagaaaactatattattgtttgtttctaatagttgtgtgtgtgtgtgtgtgtgtgtgtgtgtgtgttttaacacttctctggagttttttacatggaaagcggcagtagcaatattgtttttcctaactacaaaacatccaaaggtccatttagcaacttattgtgtatatatttagccatagtcctatagttcctacatttcagggtgaaaagcagaatgtattcaattgcatacaatagtgatattttcttcaattatcttttaaaccaattgctaactattttttaacattacaatgtacgtattctctatgtaagatatttagaaaatacaaaaaataaatacaattattaaagttgtataagcactgctaagaaattggtttatttgtcttcttcccatctatttctttctctcttctctctgtatatacacacatgcatatatataaatatacatgcatatgtattttgtatgctattttttgattaaaataccatggttatcattatttttccagctgacaaaaatccattgtacaatctcacataagtgagcaatttgcacatacaccgctgtctgcctcttttatggattctttattacaggctcctagatatggatggcagagttacagaacatttaagaatactagtacctactgtcaaagtgcacaaatttacactctgaaataactgatttcatggcatccttgccagcactgaacattatttttaatcttattttaaaagaagtaaatattctaatttgtatttatttacaaatatttccccctgtattcactcacaatttgcatctagggtaattactcctgtttcaagacagaatgaattcgatatgacatgaactgactacaacaccataaatgaggtggcttctctgagtattttccatgctcaggtctgattattgatttggtgagccttgctgagaccaaggctgagcctctcaatgcacattctctccacgacgtaggaaagtatcatgaggagaaggcatcattacgtccacatgggacaaccagcttccttctgtcctgtggcctcagtcattttaaccctcaccatctgttctgctgatgagtggctctggggtgctgaagaggagagtttgtagatgattaaatcactcattcgttttctttttaatttcaaatgtcctgcccctatacaggtaagacttggcatatgcttgtttagtgactgaataactttgactctgtcccctaaacacagggtctagtaacagaaatattcatataacccaaaatacctagtaagtagggctagaatagatttgcatgcatgccagagaagggtgtgtggctctctccatggagggtgatacataacagataaggtaataatccagctaaactgtaatgcaggagaagagtactggctttgaagatatggctgggaagcagctgccaggcacagatacagaatgtgcacggatcatggtgtgttagacaaggcctgtgctgtttgggatgaaaacagcataaagcatagagtccaagaatggaggcaagtgagactagaaagaaacaggaagaaaagataataagggggctcactcttctcatgggggaatctacatttctctcgaagtgcctaaaagatttgagcaacagaattgcttactctggcaccaccccataggaaggataagagggaaaagtgatttgaatatgggagtcagatatacctaagttctaggtaaagctgtgtctattaacaaataggcaaatcaataaaataatgaataaataaaagaaacttgtaatagatgggtgagtgagaaaaggcctaggacaggagtaggtgggtagataaagaatacagttttagactttacagtcacctatatgtaatagggaacgctaacttactagtgttctactagcctaacttatcagtacaacctgaagcaagaccaatatattcaagctagtaagaatgatgatagctaataatgagaaaaatctaagttactcacatgtttacagtgcttagatagggagagtgagatttcaataatttttgttttttctttccttttttttttttgcctacttatgtgtatttttaataattctgtaggccgggtgtggtggctcacacctataatcccagcacttcgggaggctgaggcgtgtggatcaccagaggtaaagagtttaagaccagcctgggcaacatggtgaaacccagtctctactaaaaatataaaatttagctgagcgtggtggcatgtgcctgtaattccagctatttgggaggctgaggcaggagaatcacttgaacccaggaggtggaggttgcagtgagccaagattgtgccattgcactccagcctgggtgacagagtgagactccatctcaaaaaaaattaaaaaaaaaaaaatctgtaatgatgtgtgttatggaaaatgtaagttttgtataactaaaaataaagggaaatataataatggctaccatttttagtatttacctgtaagttttaaactatattcagggttttacatttgtcactaatactcataacagtcctatgagatactttttaccctcaaagaaattaaagaatttatctaagcacatagacaaatgtagtagattaaaaagcaacctaattctccgttcctccctatttctacaccctttacaatgtgactttgcagctcctgctgaaataatttatcaagagactccagtatcctgggttcccatgttagcaaagtgacactcaacttagcataaatgataaaatgaaattaagtttaaccaagcacaactgttaaataacctttaactagggactttccactagaatgatccaaataagactactgcttcactttaaccaatcaaatattttctttgccttgcttctgcattcaccctctaaaagtcttccccaggtgccgctttggcacagccctgacctgcttgatgtctagagctgcccaattcatgaatcactgtctgttcaaataaattctttaatgttttaatgtgccgacgtttaacttttaaaaatccaccaggaagttgagcctatttccccatccctcaaatctgagctagtctcatgactttctttggccaaaagaatgtggccaaagaaaataacagctcagagcttgagatttgagatcctctgcacacctctactctctctttgcagctcttctgctaacaagtcaacaaagtcaggatgatgagacaaagtggcccagccacatccatcactcaggccatagccagccaatcattagatatcagccatgggagtgaggccaacctagatcaccagcctgaccctggttgagaatagacccctgagcaaacccagccaagatcagttgaactggcccaaatcaggactatcaactgacccacagatattgttttaagccacttgggttggggtagttttttatatgccagtagctaactcgatacaatagacagtggaagagccaagatttgaacccatgtctaagttcactcctgtgtctctagagtttcttctgtttccattatgcagttagtaataggccataggctttacaaaccacaggcaaattctttttccctctctcccctcctgcaagtgtcttatttaaaattatttattatttacttatttatttatttattttgagatgaagtctcacttttgtcacccaggttggagtgcaatggcatgatcttgactcactgcaacctctgcctcccaggttcaagtgattctcctccctcagcctcccgagtagctgggattacaggcacctgccactatgcctggctaatttttttatttttaggagagacagcgtttcatcatgttggccaggctggtctcaaactcctgacctcaggcgatctgcctgcctcggcctcccaaagtactgggattacaggtatgagccaccacacctggccctgcaagtgcttttatttaaaaagttatgcctggttttcattttacctcccctcaagatctaatttgtgttatatttaaatctgcaggctccttcagggctgtctagtgttgttttgtttttgagtagtttgtcaatataattaagttcctggagcgtagggtgcccatgccatagttcactaataaaattaaaatgaacctaagaatatattttattgtatgtggccttcacatatatctcattttatattcataaacctatgggtttttttaaaaaagtattattgtacaaattttacaggtaaaacaacaaaacaaaatgaaaataaagactaagatagaagtaggctacgtgtctggtatagagtagtgaatcagacaccctgcctgcaagttccatctgccctcatcaccagatcatgaaatctagattctgacccagaattatttagtccagctgtgagtcttaagaagccatttcacagcctagctttctggttagaaataacaattcatttcctattgcatttcaaacattgctggtttaaccgaggttcttcattgtccccagaaagagtaaaaacactataagccccctaaagagtgtaaccttcatgagggcaagacccttgtctattctctttgccattggatccctagtgcacatacaaggcacataatgtataataagcaactgaaggtattgagaatctatgtactaagctcttaaaaatactcattgaaaacacacaatctcatttcttgcaaatcttctcatttttcagatgaagcattaagattcaagattttacatatcgttcctaaagtaactcagggaataagtggcagggtctagttttgaacccaggattgctgaggtcaaagtgagtgtactttttctaattgcccttccatcttcccaaagtaacaaatatgcttgcctgccagataaggattggatttccatataagtagccccagggtgctatctccaccaataattaagaacaaagaatcaggcttcagctaaagcaggataagcagattagacattaatttaaaaggtaccttcagattgttaaatttttgaaccaccagactgtgttacaaattaaaatgggattttctgatttatggtttgattctatagggaaacaattctaaaggcaacatcacctatgtaattgcaccaagaatgctgtgattatttcacatagtgccatagcatgactgtaggggccagatcattcccattttgcctcctgatttgctcttcatccaggtctttcctaacatagcgtgaacacaaaggtcaatttcctgcagtcaatttgaaaaaggccaactctcaattaagtttgcaaaaggggtcagaggtgatgtggagaaataaaatccatgggtaatgcaaaacacccatatgagctctgtgctctaatagccactacttcccaacatgaaccaaagcggctaaccagtagtaactcagatggatttgcaatctgttgctcaaattgcatcatttctgctatccatctcaaatgaacaaatcaataaggggaaaagatgcaaggagaacaactggaaagataaggaaaatgcagagaaagggataccagtataacatccaagctgagttttattattaaagtcatcactatttagattttagtaaatattttcctccaacttccaataaacatgcacatttcccattaatctttaattgtcctcccatccccgaggatgaaccagcatttctatgccacgcagaagactctgctgactatcgaaaggccatcctaccttctcacactgcagagtagtctcctaaatccaaaccagacagggtctttccgtggagaggctcactgtggtctaccataattaagccccaatactaactgaaccactaactgttgacatggggcataaccagagcccttccactatgccaccctctctagggaatggttcattcaaccttctggagtaagggacataaagtgtggggcagaaagagagtggggaatcagtaaaaggcactgttccacttttgatacaaatccctgtaatcaaaaccatacttggccagctcagtcttacctccaaactccctctgagatgctataaacattggcagacaatgcatataattaaggtggaatatgtactcataaaatgtttgtttccatctgctagttgttttagcgaatgttagatttcttgcggtcagtcggagaacaacagaggggattctgaaatccccactgagaagcagctcatgagcatggcacagggacatgccagaacgtgcagccctgggaagcaaagaaagacggaggtgagagtctgttttctagccttaattgtccagaagcagcctgggtgccatagcgacataatcaagttctccccttttgactgtaaagaaacacggagagactgtgcgtattgttgtctttcaataccaaagggagaagtgggtgaaagaaagtaagagtgttctggcaccagaataatttctccattacctcaattagttccaatgatgtggaaaagttctgtctggagaaatcaaactgaacataaaatcactgaagcgccggtggtggcggcggtaggtgttgatacaggcattagtcagcaatactgattgcagtgaagtcactcaatagccctgtcgctggaacctaggcagggaaataaactcattagatcacccccttcagtgaagcatgtggttttcaatgtggcaccaacataatctggcacccaccaaaagattcagccatctgcccctggaaggcacaatttactaaggtgtctggtaaagaaatctggataagtaccattttttattttctaaagaaacataaatatgtcttcttgcctaagagccacttttgccgttagttatgagatgttagattttctttaaggaggtaggtagttctgtgtggctatagagtacagaattgagataactaaaaagtatacactatcagagaaacttgagttcagcatacggaaatttttctgatacttctggcaggccataaacagaatggcacccacatgagatagatgtttaaacctcccattgggtgtcaatggaaagctaggtcctaacttgccatggatagtacaggaagattttttcattagataggtcattgaatagttgagaaatccctttctctagtcaagatccagttagcagaaggagttgagagaagaaaagaaaacatagatttcttttcctcccatgttaatatccacatatcctgtgcccatcttctttatggagtcattgaaaaaaactctatagactctcaaaatgttctctcatctcaagttatatattaatatactatgtaatcctttatgcttgaagtaatttgtaaaaatggaaaagctctgtgatgagttgaccaacctcctcagtagtacatctatctctcccagtttttccacaaccttctttaaacacttattctgataaaaggctgccaaagacagcatgtggatggatggatggatagattgatggatggatggatagatagatagatagatagatagatagatagatagatagcatgtgttatccattccctgtgtggtcaatgacccattgcatattcccaacaaaaccactctatggtattatacccaggctacataactaaggaaatcaagtctcagagaagttaagtcatttgcccaaagtcacacagctggaaagctgcagagagagaaggagattaaggtccagaagggaaacacccccagctccctccactctctcacaccacctctataagcacaagttggggcacaccttatcttgatttagaggacctgcttcagaggacttaaatgttaagcccaacattaaagagagttgaggattcctgtttctttatacaccattgtgtagagatggtaactgacaaatgactgattgatacaagaatttaaaatgcttcttaaaatgtttttcccttttttttttttttttttttagcatgatggggtatatgccaatctaatgtactgacaaagttggagtttcacaccccaataagaagacatagccatctggcttcaacacaggccttaaaaactagaagagtagttaacaaaggtatgaccctcccagggtacactgttcagggagccatgttctgagtatgtcagaacctcaatgcctagaagcaaactctgatcccttcaggtctcaaattttataagatagatgagagtaatgaaaatatgattcctcctcttgaggatttcaaaaacaccaagatagttttgaaaatgtcgcttgaatttttcagttcctgaaaagagactgacttttacaccttgacatagattagagttccatgtaaaaattcaagttagaaagaacccctcatccatgatatttcctctgattctgaactttatgttagtagatttttgttcaactaattttcataatgctgtctttcaaattacaagtggcaagaacaataattacatagtcaatctattgtacatcactgcatagaaaattccatatagctcaagacagaactatcttcagttttagactaaaatcctgattatctacctcagtgttaaaacagggattgcaaaaataaaataaaataaacaaaagccacaggtaagctgcaatgtcacagcaggcattaatttccatattcttccatgctagttatctccctagagttattttgaggatatcacaatgattttcattacatatgcttaaatgtcttatgctttttttatgttggcttcatcatcttcataacttgtaaacaaggaccatgtcagtcactatgaagtacagcataatgattaagagcttgggctttctccaaaaaagaagaacctgaattaacttgggcaagtcatttaacctcttggagcatcaagaatggtaatactaacaatgcattagttcgtgagagaactaaatgagatagttatttaaaagcaccagcatagtacttggcacagagcaaggacttataaatgtgagttattagtataaatatgtcctcttccacaaatagttgtatgctaagcactcaatagaaactcgatataatagtgataatttgtaacatgaaggagagacaatcaccacaaattggactatattccagggtaattctgggagtctaaaattatttatctttttagtactttttgtaaaaactgtctttattgttacccaattctttccctgcctctcttattctcctgttttatattttgcccaaggcatcatttagtgttccaaaatattagactattataggtactcagaagccccaggagaaacggaatacatttacagacccataaacatctaaattagtgctataaatgggaaatatagtctatagttggagagtgcccaatccataatatgttgtggcatagaagaaacttcctttttggtggctggaaaatctatttgctctaagtattcaattttaaaatggataataaaaataaataataggcatgcttctgcttaaattgtaactttcatgggagatctcaaagagtttttcaactgttaatttatgactcctggggaaaggtaggtggcaagtaaaatatttcttcttcaaatggagaaacagacatagaaaggcctgggtgacttgtctaagaatacaaggcatgctccagctttatgcaaaccagaaaagaaaatgtggagatacgctctttaaatgatgaaatctgtattatgtgctgataaaacctaagataaatgctgacataggttgtacaattatcatatacctaacatttgtctatcagttgtctattcctgcaaactaccacaaaaacctaatggcacataatggtatttattcttgctcatgtatctgcagatgggatgggagttaatcatataggccaagctcaaggccaagctcacctgggcagcccaggattcagattgaatccagatatgctccatgtgcctttcactctacatagaccagaggtctggccaaggcatggtcatttcacagcaatagaagagcaagaaagcaaactccaactatgcaagtgagctgtgtcacttctactgatcctattggccaaaacaagtcaatgactaagaacacattgagagtcacaagtatattttacctactaagaagacaaaaagtcccatggtcatacccaaaatcaacttccttggaagtgcaccctccccatggaggtaagagaagagagtgaatacttgtaaacaagaatctaatttattgtaaacagcaccttattattactaatatttcagacattttttcatgtgctaatcttgaaactgtggctgcttctcatgcttctgtaactctgactcaaccactggtttcatcctggcctagaaggtactctctgaatattagtgtattattcacatgtattagttaactacagcattattcaaagctcttcttttttcacataaaccagtctttcagctgatctccctttagagaacaaaaacaataaatgtaggcatcatttattgaatgcttactgtacaacagatatgtgctaaactcttgacagatatcatctgccttggcttcatttaaccctcacaacaagctaaggaaggtataatccctatttcataaattaagaaactgaaaattagagagatgaagtgatattaccatggttacacagaagttagtaacatggctgtgattcaaaactaatatgtctggctctcaaagtccaaatgtgagaccaagaaaatgcggtgagatgagggctgagactgattcagtctacagtgacagcacagacagcaaaattattacacctaaatgcagaggaaaaaggaggtgtgcataactggctctaaccaccaggcctgccactgtcttgctgtgtgatcttggggaaattacttactcacttaacttctgttttctcatccgtgaaatgaagatgatatcatttttgtttggttgttgggattttttttttggaagggtcttgctctgttgcccagacatcaaatacctcctttcacttattagtatctccttgataataaagatactaattaaagtgatttaagaggaagtctcccaacagggacatgatgctaattaatttacattaaattgcatatggtacaatcatgtaaacaacttgcacttatgagtcttttattttttatttttatagagatgggatcacactatgttacccaggctattcttaaactcctggcctcaagcagtcccctcatgtcagccttccaaagtgctgggattacaggcatgagctactgcacttggcccaacacttaagggtctattcacaggcactctttagtccctgagattcctaaggaaccaggaaagcctaacacctatgaaaggctcagtgcaatacctttagcacattggtgtcattgcagatgaggtcttgttacctaatggagctgaagctttagtgatattgtttgaatttgtgtcctcacccaaatctcaggttgaattgtaatccccggtgttggaagaggggtctggtgggaggtgattgaatcacaggggtggttccccctttctgttcttgtaatagtaagttctcacaagatctgattatttaaaatgtgtagcatctgccccttttctttcttcctcctgcttcagccatgtaagacgtgcctgcttccctttcaccttttgccttgattgtaagtttcctgaggcctccccagccatgcctcctgtacagcctgtagaaccattggccaactgaacctcttttctttataaattacccagtcttaggtatttctttatagcagtgtgagaacaaactaatacacttagaaaactcaaaaattccaagatgtcacctgaggattctttctggtttctagcatgccagtatcttggtataaatccacacttctcttcaagttgttttgtgccacatctacacctttcgcccaatactcgatttgtttctcatgttagaacagtttgaacacccattgaggatgtgacattcattctctctctcctccttttctctctctttctctctcctcatattatacagggccaaagggaagtcaaggattagggcttcagcctcatctaaattttctacacagcaatgcaatttaagatacttcattaaatgcagtgccagttgttttcatcttaggcagcaaatgatatgagaacagccctctacacatcaaggccccatggggtaggctatagacagccagaaagaagatcagctgtccctttgacactttactttgaagtccagctttctctccaaggtagctgagtcctctccacatcactgccaacccctgcctccaggctttatctaaatcaccctcctctccagttaaatctgtaggttcctgtggggacgagtggctcccactggctaaggcctatttctccaggttatatatgtcagagttttccatgcctttaacaagactcaattaaaaattaatcagcccagcatggcaatttggagaggtaattgtttcttttcctgactccatggccataggctaaaagcatacccagtacctaaattaatcatctaattgggatttttccatactccaatgactcaaccttccagcgatcccagcaaagtgctgtccgacctcaataattaatttgccttagtgtccactctgtgggtttctcccctgctttcccttccaatcccctttagtaaaatagaaaatagccatataggccgtttacctgggccctctccaataaccaggaggctttatcttcagaagataaaatagcacttgtgaggaaatattggaaatagtggggcaggttcatatattcaacatagtttgtaatagaaaaaaatggttactaactaatggtagtacttgattggctaaataaagcatagtatatccatgcaacacacagcaatatggctttaaaaagaaatgaggaaatgtcatgtatgcagctatggaatgttctccaggatattaaagggaaaaaaaagcaaatcacataacaatacatgaaatgttatatttgcaaaaaaagggaagaaaatatatgtaatgaaacgtatgtgtgtacagacatatataatacacacatatacacatgtatgcatatgcatatattgatagagaaatataaatatatataagtttgtaatgcacttaaatcacctctgggaggagtcacaagaagctataaaatcatttgcctgtggaaagataaactgggtgtcaggaggggaatagaagagaaaatttcattgtatgtcattcacgtgccttttgaattgtgaatgttcttcctgtccaaaacataaatacatttatatctttgatatcatttaataatacttggtttatggttgaaaattcttacaaacttatatacataacatgaatagatagacaaatagcacatttaaataatttttaaaaagagaagagcagggagaaggaaaattagtacttattgagctgtgtgtcagaccatgtgtacccgtttttttgtttttgttttagtttttgtttttgtgacggagtctcacgcagtcacccaggctggagtgcagtggcacgatcttggctcactgcaagctccgcctaccgggttcacgccattctcctgcctcagcatccccagtaggtgggactacaggcactcaccaccacacccggctaattttttgtatttttagtagagacagggtttcaccgtgttagccagaatggtctcaatctcctgacctcgtgatctgcccgcctcagcctcccaaagtgctgggattacatatgcgagtcactgcgccaggccgtgtatccgtatttaacactcaaagcaaccctgcaaggtgtcttcatctctccctttttttttttttaacaaatgaatatagtgaacatccaaagaagaaattaggcgaataccagaagtgcttgtgttgattcatagtagctaacacacacacatacacccctttatatttcattttgatataataaatacattgtttactcttcccaaatataagataaatggcaatctttttataaggaacccactctctcaataactgcattaatccatatatgagggcggagtattcatagcctaatcaccttgtaaatgtcccgcctctcaatactgttaaaatggcaatgaaatttccagcacttagtttttgggggacacattcaagccacagcaaaggtaatctcgcttttgctagtctcagttcaacctttaacaagacaagcatgtatacctatgctgacaagcagcaggaatgttgcacttagtcttatcgtgataacagaacaatccttataagtttcaacaacatctgcttacaaacatgtaggaggtgagaacaagtccaatttttattttatctcattacttaatgagtacaatggacattattcaggtgatggacacacttaaagcccagacttcaccactatgaaatatgtctctgtgaggaaattgcacttgtactccttaaatttatacaaataaaaaaacagcaataaatacataaagtgtcctgtaaaattcagtgttcttgcagttggttcacaggtcctatccgagcataacaaaattatttacacagcttgtaacgacctattatagatggtattagaagaattcttctaattctctgttaatcacactccctgctctttattagctctatctaggcaaagcatctccctggagagaagaatttgcagcaagcaggaagctctggcctcttcatgttcatatcatgaaaactcaagaggactccctgcgacctctgaccttttctccatggttggggttgccttaggggtctctctcccatggagaaagaaccaccagcctgcttgcccctctctccttcctccctctctggtcagcctcacctgtgatcacccagggtaggaagagaggaaagccctccccaggctctgataacagggttgcatgactgtaattacaggctttcgcttcccagctacccaaatgacagtcacagtggaggctgaaacgcctcagtcagatggaatcaattactgggcaaaattgggaggttaattttccccagaatgagatatgccttttagctttgccatctcttttactccagctggtagcttatttggtcgcattgttctctggccatatgaacaaagttccattaggaaggatttccaaaagagttgatttgaaaaggaaactccatcagcccccaaactcaatacgagctgaataggactgttattaacaaagcagcatggatggctaatcactagaatttacatttgacgggcatggggttaatccaataagaagaaatgagatctctcagtccagtaccagtcccttctttaaggtcccctggctgaactttaccatggcccagcactgaaagagctttaccttctggaaacttccatgaaaataagccacttccctcattagcataattttctaaatatgacaaagcatctcattgaaaacaaaataaaacaaaagacaaagagtattcatctttttcaagtacaattgccgcttctgagtggcttagtagaagtgttaaaatagcttccatttaatagtttataataacaatagagactaaaatttattcacgtcccatgtttaaggaaatggtaaatattatttattcattaactcaatcacctcaaaaaccaccctaaactgaggccatgagaagttggctaacttgttcatgtttaccccactgttaagagtcagaatgtgggccgggcgcggtggctcacgcctgtaatcccagcactttgggaggccgaggcgggtggatcatgaggtcaggagatcgagaccatcctggctaacaaggtgaaaccccgtctctactaaaaatacaaaaaattagccaggcgcggtggcgggcgcctgtagtcccagctactcgggaggctgaggcaggagaatggcgtgaacccgggaagcggagcttgcagtgagccgagattgcgccactgcagtccgcagtccgacctgggcgacagagcgagactccgtctcaaaaaaaaaaaaaaaaaaaaaaaaaagagtcagaatgtgaacccagataacctgaatccactacctacaatttaaaatcactctgctatatgaacattgtcactccatatgtgcaaacatttcaaaagggaaatattcttatcacttgtaggtggggaatttggagcatgaagatattaactaactcatgcaagttcagagagctcttaaattagtgaagctgcaagtccatgccagatctgtcagactcaatagcctgaatacagctactaaaaccctacagaggctttgcaagagccactactgcaaggccttgggtgatggttagctaaaaataagtggtagtggttatcaattctagtatcatttatgttcttctcttagtcctctttaggagaatttatgagtcctataataacattgtatagctatattgtattctgaatcctacatagctgttttctttatatcatctctttagggggtcactccatgaagtaagtacacatttccttaggaaacagactttaagagtttgaataacttgcaagaaaatcactggaattaaagttcagtgccatttctcacatgtttattgcggcactattcacaatagcaaagacttggaaccaacccaaatgtccaacaatgatagactggattaagaaaatatggcacatatacaccatggaatactatgcagccataaaacaggatgagttcatgtcctttgtagggacatggatgaagctggaaaccatcattctcagcaaactatcgcaaggacagaaaacaaaacgccgcatgttcccacttgtaggtgggaattgaacaacgagaacacttggacacagggtggggaacaccacccaacagggcctgttgtggggcggggggaggggggagggatagcattagaagatatacctaatgtaaatgatgagttaatgggtgcagcacaccaacatggcacatgtatacatatgtaagaaacctgcacgttgtgcacatgtaccttagaacttaaagtataataataaaaataaataaaataaaataaaataaagttcagtgccatttctactactgaaacctaacaaccccatgatacctgaaagatttaaaggtaggtactttattattttctgtcaatctctaattcaggaaaaataagccattatttgctaatgttatgccatttattagaagtgaagcggccgggcacggtggctcacgcctgtaatcccagcactttgggaggccgaggcgggtggatcacgaggtcaggagatcgagaccatcccggctaaaacggtgaaaccccgtctctactaaaaatacaaaaaattagccgggcgtagtggcgggcgcctgtagtcccagctacttgggaggctgaggcaggagaatggcgtgaacccgggaggcggagcttgcagtgagccgagatccccccactgcactccagcctgggtgacagagcgagactccgtctcaaaaaaaaaaaaaaaaaagaagtgaagcttgtgttggtttaatcattcagcagacatttattaaatttccactgcataccagactagtagcatggtagtagaccactatcgaagtctcagaacaggatagaaaatgcccctgctctcacagaccttatattccactgataaacatggcaggaacattcgtaaatgccttttacacttctcacgtatcagatacattacgtaatgtggttggaaattggattgaatggcaaacaagttagcgttttctgggtagaagtaaaacatgctagattgtttttctttgccaaaggagtataccatgataattaagacatttatgaaaatctaaaagtgaccaagcgaaaaataatccaaactgaaattgaaaaaaaaacataatttttccatattattgaaaaaaaaccataatttttccatatttctttcagttgtaataatgtgaggtgtgggtggtagtttttacattacagcaggactccctactttatagttcatatacctgttgatgtacgtggatctttaacctcataaagaagtgttagggcaaagcaacatgaaaaaacatagattgaaaactacttctaatttaaaattttaaatggaggttaatttctgaagttaaaaaagtagagtgattaaattcataattatacataataagcaatatatatagaaattgtatgtaatattttatataactgataggttatatttatatcattcattataagaatttgacttactggtattacgttctggatctggattccagatttcatgaattgaggcttacctgtatttaagagatgtcagggctgataccatattggatgtgaggggacattctgttctcagtagtcactgaaaaatgatatttatgtaagccaaaagaaacacacacgcacacatgtgcacaccaacacatacacttttttaccctctaatatttttagatcaaaataatgtgattcttgttttttattcagaaggggtaagagaccctgttgttacaaatctctactaagtggtttccattacatttttttccttcttttttttttttttttttttttttgagagactctctcactctgtcactcaagctggagtgaagtggtgtgatctcgactcactgcaacctttgcctcctgggttcaagcgattctcctgcctcagcctcctgcgtagctgggactacaggtgcgtaccaccatgcctggctaattttttttgtattttcagtagaatacaaaaaaattctaccaaaaaatagaatttgtagtagaatttagtagtatggggatgtcttttgcacttcaacaccacggtgtgtcctcttgcatgtattttctaagttacgaccatgtgagcaaatggtgattattgaatagatcctgcttaatgattttggtggagaagtgaaactcttccttatagataaaggccttatttgccttgccacttagacagttttacaccttgtggcatcctctgtcagcatgcaatttcttccattattcaacgattgcaaatgtgtattggaatctccacaccatggagtttcgccatgttggccaggctggtctcgaactcctggtctcaagcgatccacctgccttggcctcccaaagtgctgggattacaggcgtgagccaccatgccccagatatccactctattctttttttttcaagacagagtctcactctgtcacccaggctggagtgcaatggcagcgattctggctcaccacagcctctgcctcccggattcaagcaattcgcctgcctcagcctcccgagtggctgggactacaggcgtgcaccgccatgaccagctaattttttgtatttttagtagacagggtttcaccatgttggccaggatggtcttgatctcctcaccttgtgatctgtccacctcagcctcccaaagtgctgggattacaggcgtgagccacggcacctggcctatcccttctattcttagccctggcttttcttctcatagattgtttccttccttgcaaaggtagtccctgataagagctggggcacaggcccaggcccaggcccattgagcactgaccttcccccaattacagtatctatagtgtaggtgtaaaaggggctttctcattattattattttgtggtcaaaaggttgcacacactcctttttttttctgctgctgaagcttagaaagggtggaaagcaaaatattttgataattattcaggccatcaggttacataagaggttccacagccttctgcatcaaacttgaacagttgaaaccacaaattctgtttttgcagccataaaacattcatagcaaaaaaaaaagagagagagagaaacagaaaataataaaatccattttccatttgcttgaaacttataaaatttaatgtggtgaaaaatgacagtttactccctgtaggaaactgctcagagccatgtttcataggcatggtgtggagtttctaatgcacacttgcagtcattgaataatgcaagaaactgcatgctgacagaggatgtcacaaggtgtaaaatatctaagtggcaaggcaaataagtccttgatctataaggaagagtttcacttctccaccaaaatcattaagcagcgtctattcaataaccaccatttgctcacagtcgtaacttagaaaatacatgcaagcagacgtaccgtggtgttgaagtgcagtagacatctccacatgaagactgaagacattttgctattagcagtagctaaatgtggttactagcatggaaaacatttaatttttttttttcagatggagtctcgctctgtcacccacgttggagtgcagtggcacaatcttggctcgctgcaagctccacctcctgggttcacgccattctccttcctcagcctcccgagtagctgggactacaggtgcctgccaccacacctggttaatttttttttttttttttttttagtagagatggggtttcaccatattagccaggatggtctcgatctcctgaccttgtgatccacctgtctcggcctcccaaagtgctgggattacaggcgtgagccaccacgcccagccatttttttttttttttttttttttttgagacagagtttcactctgttgcccaggctggagtacagtggtgcgatctgggctcactgcaacctctgcctcccaggttcaagcaacactcttgcctcagcctccagagtagctgggattacaggcatgcaccatcatgcgcagctaatttttgtatttttagtagatacttggtttcaccacgttggccaggctgatctcaaactcctgacctcaagtgatccacccacctcagcctcccaaagcactgggattacaggcgtgagccatcgcgcctggcgaattattttttttaaagatatggtggcactagttataacctctacataatatagtatttgtatattttttctttttctaatatatcattaagagtaagatcaaaacattcaatgcacagtggcaaaactgtagagctccagctctgtaagtaactggcagagtggctataaacatgcctttaaactcaactgaccttgatttctttcctataacgttaatgggttggactaagtgatttccaagtccaacttcaactaatattctgtaggaatttttagaaaaggataatcgcctggatattcaaatcagtagaacgttgaaccaatgaacaactgaaaacaagaactgttttgactatatccgagtaaagttgaatattataggtggtttacgaaatgtctgtgtcctacaatagctttaatcatatctttagtgtttgactatattaaatgcctattaccataattatgctgcctaataatccatctcaaaacttagtggcttaaaatagcataagtatttactattgctcaaggatctacaggtcagctggacagttctgctgctctgggtcaagcctggctgttctgactgggtttgctcaagcatctgcaatcagctggtgaaccatgtgagaggtagttgctcctacggactggatgtttatgccccccccaaccccaaaaattcaaaaattgaagtctaaaacctcaatataatggtatttgataatagggcctttgggaagaaattaagtaatgaggctggattccttatgaatgagattaatgcccctataaaaagagaaagagacaggagtctctctctgtctgctgtccaacttgttgtgaggacacaagaagacagccgtctgcaaaccagagagagcaccctcttccaccagataccagatcttcctgtcccctgaccttggacttcccagcatccaaaactgtgaaaaagaaactactcagtctataatactttgttatagaaacccaaatggactaagacaacttatttaaagtattttttttttgagacggagtcttaccctgtcacccaggtgggagtgcagtgatgccatctcggctcactgcaacctctgcctcccaggttcaagggattctcctgcctcagcctcctgagtagccgggattacaggcgtgcactaccacgtctggctaatttttttgtatttttagtagagatggggttttaccatgttggacaggctggtctcaaactcctgactttgtgatctgcccacctcggcctcccaaagtgctgagattataggcatgagccaccacacctggtctatttaaagtatcttctaatataaagttctattcacctgtcattttaaatggacttaatatactgcaatattctagtgtaatgttgggctcctgtaactcacagaagtctagatatagatatagatatatagatatatagatacatacagatacggatataggtagatataggtatagatagatatagatatatatagagagagatatagatatgtttgtaaatattttgagtattttaaatacctaagtaaaaatgcccaagttatagattaacatcaccaagtggttttgaaaaaatttagctagggacaagcctttagctacatcagataaggattctacaaaattttgtagactcattctataaaatcatcagtgcttttcttccaataagcttataaaagtaccgagaatgcttttccaagcaaatgttttctaacaattctgaaactgctctttaccaggcatgttcaagtcctgcctttttattaatagtctctctaaatccaagttgattaaatatagttaaaaggagagaactatttgagaccaaacatggtagtgcaacttggtaactcttgtttcatttgctgtgccatccagaccaaaaaaaaaaaaaaagtcagtaaataatcaataagaggccaggtgcagtggctcatgcctctaattccagcactttgggaggccaaggcgggtggatcatgaggtcaggagttcgagaccagcctggtgaaaccctagctctactaaaaatacaaaagttagccaggcatggtggcatgcacctgtaatcccagctgcttgggaggctgaggcaggagaactgcttgaacccaggagacagaggttgtagtgagccaagatcatgccaccgcactccagcctgggtgacaaagcaagactccatcttgaaaataataataagaagaagaaataagaaaaaatgtttatcatagtttatatacattgtgccacagaaaaatataactgacatacagatgtagaccattgctttgtattttagaatgagttctggtaatgtttagaggaaagagatttacctttattttcagcatttccataaacctttcaaaaacctctaatctcttaaaagtacaagatgaagaactacattagaaatttcccaataggcaaccacaaaaatataatattaccacttaaaaccaacattattcctcctccttgttagaatgtggcacatttgagcatcagatacaattaaatatatttgaagactataactgaatactttctatgtgagaagtagaaaaatgtcatgcttgaaataggcaaataaaaaaactgaaaagtaaccaaatataagacagagattctgcaataagccatgtcttcagcattttaaaagctgaagccacagctttttattgttgttcatatgtcttaagagtatttccaattggcaaagcaatgacaaggtgcatatactttttcatactttttgttatttgtacaaagctattttggttaactccataaaaacacagggaaatagaagcttgaggccaccactggaattatttaaaacacaaagaaaacccatgtgtttcattcacacagcaatttggggtgaatgtggttttcagccaatattttccagaaaaaccacttaatcccacaagtttcttctgagtctgagactcaaccagaatcccagctgactggcttcattcagtctggagacccaaactggtccgggatatgcacttaacatttttctgaactctggaagatcagagaaaaattacaggtaatatgaaaataggaaatacttgatgccttaggaattctagtagggcaggaaaacacagactgaaaccctacaactgctcagtacagtcggagcatccttgactgtttcccatagccctcatttgatactaacataatcagtatcaacactctgcaaccaggcttcctgagttcatacccagattttactgcttactaatagtgaggacctaagtccctctaccttgggttcctcacacataacgtgaggataatagtataaaccacatagcattcttgtaggcagagaatgatattgtaagcataaagctgctcaccagagtgcctggcatatgtcaaacacccacaaatatcagcaattattatcatcattagttatatacaagcaaatgcatataaagaagtctgaccataaattcaatatcacacttactgatgacctaaaatccttattactaagaaaggaagatctgagaactgccttcctaattctgggctctagtgctcatccatggcaaatcattaaagaggattgagaatcccatctttcagtcaagctcactctaacctctgaaagccccattcatttctagaatcatcaatcagtatttatggagcaccacatcagacagtgagaaaattaaagaaggaggaaagtccccagctccagacagactcatcacccagggaagagacagccatattaacaaataattgccatgccttaatgcacacagaaagctcagggcaacaaagaggaagggggcttatattatgcctgagggggttggagaacgtttgaccgagaagggacattaggtcccagtcttggaggatgagaaagaggtcatcaaatagaggaaaaggaaaaaaaaaaaaaaaaaaaggaccccacataaagagtagcagatgccaaagctttgtgaaagctcttacatgtaatgaatatatcaagttagaagtggctgaagcaagaggtataatgcagggatcaaacgagcaagtttggagagggaatcactggaatatattccttctccccattatgcagaaaattgaaatgaaaattaactaaaacataaattacttagcgatctccacacaaacctcaagtctgaaaaataggacccccaaaattatcccttccaccccccaaaaaaatcactttcttagttaacagtgcattttacttgctcttgcaaaaatctccctgccaatgctttctttccacaatcagaatcttttacttttaatgtaccaaaggaaacgaaataatatttattgtgtctcttgcatgtgcttcttagaaaaatggcattagcctcatatggaaatactttgacagacccctgaaaataattccttaaccacaaacatgtcctctacttgtctgatctcaaattgcctcaaatatcacaatttcaggtcagatttaaggatatgacaggcactatcagtccattacatatgaatgatatatgaggtagagggcagaggtgctggcacagaagacggccagttgtggggaagccccatgcctggttccctacagtatctgcctccctgggaactttccaggcccacctgaagacacttaccagccaacggcttcctctgcacaaaggagaagaggaacaatggaagctctctctgtgttcatcatccagataccatctcggaacctcactggagcacgattattggaggcaaaataacacagataggatttcacatgcgagctttggatatggggctaacaaagatagagggacacaaacaacccctctccctgagcccctgccttcctcacaaccccttgttgctctttcgcttccaacttctaattggcagacacctgatctgcatttcgatttcattttctgagcacacatggccacttgagactccctgatacgtgtgggaaaggggtggccatgttgcctgcacctgttgcggagacctgcccgccgcccctcccttcctgccacccccattgtgtgccaccttattctgtttcagtagcaacagaaaagaagtcaaagtcaccggcattcaacaggaacacatacaaaaaggaagccagaaagcttccttgtacctcttctcccaccaccctgaaaagcctgcccattggcctacttcaatagtaagtgtagcaatcctatctcatttcagagttatgccaggtgagagtcgtaaaaggtaacaacataatcatttctctggatggcccattgagcattattgatatgaattggttacacaaacacacacgcacacgcacacacaacctaataagaaactactcatatttgatatccccatgtagaccatatctattacttttgtgaaaataaaaagatcaaagatcaagggcactggggacttttaacttccaagagaatacgttgcaataccaataaactttcacagcaaccaccttggaatgtagactgaaactgaataactctacatacagatcttaacgatgatgataagaacacactcaaattcaaaggagagaaagaaagaagtacagcagctaccgtcctgagcaaacgtgcagcaatgaaacaagaccacattttgaagtttgatggccaaatgccttggttggtgtctgtcaccatgtggatactaaaatgttagactataatgatgcagtgggagtaataatacatcataagacctggaaatggaaagaatccatgaaatcatcaaataatgttttggccagcagaggatgcagttcccagagaatattccttaaagtcccccttgggttgagctctaaagaccaagtcactttatccatctcagaagagagtgatctgtccatctgtagtatctggtttctgctatgaaattaaactttggccttaaaagcattgttccacaccaaactagtccttggtaccaggttttcattaaggaccagctatagcctatggaggaggcaggaaaggtcattttatccattcccctacctccgggcaggtcttgtgtgaaatgacaccagcctggctcttattataaaatccccatagcaggaagttctatagcccctgctgtaatactgttttcccatgacatataaccctcatggttagaaagtgttttctgcagtctagacacactccctcccaccgcaattttaaaacatgttcccacagtagcagagaactatttaccacattcaaggtccctgaagaaagaaagcaacttaatattgctccctctatattgcttcttgtagcatggtcttaatttcagctgagctttttatatcacagtttatcaaaaaaaaaggtgatgtgggcttttggaaggcaagagttgttcctttttgccatttgtgggtactgctggggattttaattagttgtaaagacaatgtggaaagtagagcaacattcttccaataccgttagttcagattttgatatggtatgatgcaaactggcctgaagatctgttcaactattcattgcattatttcattttcttttctttttttttttttttttttgagacggagtcttgctccgtcgctcaggctggagcgcattggcgcaatctcagctcactgcaacctccgtctcctgggttgaagcaattctcctgtcgcagcctcccgagcagctgggactataagtgcctgccaaagcgcccggctaatttttgtatttttagtggaaatggggtttcaccttgttggtcaggctagtctcaaactcctgacctcaggtgatccacccgccttggcctcccaaagtgctgggattacaggcgtgaggtacagcacccggcccattatttcattttcattatattgaaaaaatcatttaaacatttactaaacttggctgggtgcagtggttcatgcctgtaatcacagcactttgggaggccaaggtagaaggaccccttaaacccaggagctagagatcagcatgggcaacataggagactcctgtaaaaaaaaaaaaaaaaaactaaactaaattaaatatgtaaaaatgaatccaaatctttaaaatatcataaacacgctaattataaatctttattatctactcttttattacttaaaataggtaaaagggcagatcctcttattggcaatcccctatcatcttactttaaattgttatacataattgaaagtaatgaaatagcatgtctctgcaaaataaaacttgtttttattgcctttaactgctcttttcaaaattcattcagagtaataaaacttaacagtctttcagtaaggaatctgaaaatacataatgcaagtttctgcttctgacaacttccttactgaatttttttaatcaactggtgagtagacacctaccaaaaaggtgctgcgaggaaagaaatcagaattaatcactttcgtgatagtctcgttctctcaaatttaaaaaacttaagtttacaataataattcatattaaaatgcatgttttcatgtcaacatttatgaaaacttctaaaatgtatcacatgagtaaaaatgaaaggatattttcaagttaagtcacttatatttcatatatatttcaaatttcgagaaaaacttgaaggcattaaattttagaggtaaaagtatgagctagtgcctttgataatatatacaccattgtttccctattttgtcctgcattaaagaagaagagaggggcaaggggagaggagacattttcttgaagttatcattgaggacatgggaacttcagtgaatattccaatgtgaattcccttgtaaagttgtcaaactagaatttcttcacatagaataagaaaatttagtcttatgaaatgtgtttaaaaaagaaataccttaactcaaagtgggtcaataatcttaagtattttctttcatatccaataatgcaatgtgtccgtgagcccacaatacgtctatttgagagaatgatagaagtatcaacgtttggtactcacataaaatatgataaaggaccttcctgttccagtctctgcctccaaagagaaacacaccttttatggatttctaaactcagccagggctgttgggaaaacactcacttatctataccaacaataacactgagcactttattgagtgcttaccatgtgttaaacacttcacgtgcatcatattatctaattttcataatcaccctatgaaagaggcactatcatgctttccattttacaggtgaggctcgttgaggttaagtaccttgcccaaggtcacacagctggtaagtagcagggccaggatttaagcctaatagtctgcagagcctcctatggtattttatacaaggctttgcacgcaaatctctttaagtagcaccttttactatcattccacttccctggatccaacagattcgacagcttggaatcattagaaaaataaaagcacacagaaaagcaaatcaaatagatctgaaataaaaacattgctttaaaatacctgttttcaatctcataacgaataagcacgagagggaaatcaacccttcggttaaattttttgtttgtcttaaaaactactggacatcaaactgccttactaattctgatctaatcatcgttctgtaactttgagtcacagttagagcagagcagctcttagaaaaagagcaagtgagaatgagactagcctcctacctttctactagaaatagtaacagtagcagcaagcacttaaatctgccaagggcacttctaggaaaatttctaaaccatctgtcccctgaaaagaacagaatttaactacagacaaaaaagaaaaaaaaattagaaaataattgcacacatgccattttcaataaaaagcaatttcttattttaattaaagattttgtctattttattccatcatctctcatttaacataaaatataaataggaacaattccataataatgaattactcctttttagggttcagctgaatactcacaagtagagcttctgcatttattttagatttaaaaaacaatgaaatgcattactgttattaaatatgattaggtattttgcgacacaggaagtaattatttgacacaactggcagtttcagttgaccttagaaagtttgtctctctctctggtcaagcactcattgctaagagcaaacggatgagtttcaaagcactggtttggaccgctggaaacagataatcaacagatgatagaaacataccctttttggggggtggtttttgttgtttttttttttcttccagatcttgtcaaaggatgattgatatgtgtggagcagcccttcaaacaccagccacagcctgaggcacttcctataatcaaagcacacgcccacccagaactaattagacattagattagtgtcaactgattgatttaaagcagctctctctcctttccctctcctccaccccccagcaatgcaaggatagggttggtctacaaaatgactctctctcaacagacagacaaattattcatggaagcttcaggaaggaaacctagagacaatgcagtgtggctaaaaagcaaccagaagaaaatttctggaaggaaagggtggggggtgggggtagaacagaacagagagagagagggaaaaaaaaagagagaatgaatcatgtttctgaaagcaatgaaacccctcggtccaatttgttgaattaagttagagagagtgtttgtgatgtttgaaagaaaattatttgcaatttaacctaggagagttctgagtacatttggctacaatttagataccatttttcaaagtctttttccttcttcttttttttcctttataaatatatgagccgggaacattcaacgttgtcttaatggattaagcagagacaaggctgcaaggagcaaattaaaaatgaaatagttacagctgttggaactggcattgggcagagagaggtaaaaaggatttctcttcttacaggataagggagatttcaccaagcctttgcagagttcagacatgcgtgcctacaaaacggtaagagtgagccctcgcctccttagccactgcacacttcagttgctgcttaagcctgtagaggggcccaaatagttgtatttcaactaaaaagtgaacatattcccagaagagaccactggagtaggagggcagccaggggccagttttagacttttcatttgcagattaaaagccttttccatttgtcagggtctgctgctactgcactctggagtcagggctgatccaacaaaaacacacctctggaattatttctgtaaatatgccccccaacagtcccgccccaagaagtgctataagagcagcagaaatgtataagaaagatactaccagccaatggaactccagcagtcttcatataaggacactcttccatctcatggcttggagagggctagagaaaaggaagaggtgttagtgaatgatttgggaagaaggagcagagggtgagaagagcagcaacggccaaacagtagaattggcattcctgtgagtcattgtgcatatttttagagctctttacagctttcaaggctatatgtattatctctttgatttcccacaacatccctagaagacaaagtatatgccattattaacttacagatttgatatttcatgcattacaaataaaatgatggaggccaatatttctccttctccctacctaggtcatggaacaagtcaatgatatgaagactcagtctcagatataaagacttccagtttctacttactggtcttccaaaatgttgcattgtctcccaaccctctgccacagtagtatgttttaagacagagtttcactcttattgcccaggctggggtgcaatggtgcgatctctgctcactgcaacctccacctcctgagttcaagtgattctcctgcctcagcctcctgagtagctgggattacaagtgcgcaccaccatgcctggctaatttttgggtatttttcatagagatgtggtttcaccatgttggccaggctggtcttgaacccctgacctcaggtgatccacctgcctcggcctcccaaaatgccgggattacaggtgtgagccaccatacccggctctcaatggtatttcatatgtatatttactttctgagttttaaactttgataccccatccatatgaaagcattctattatctgaagagctatccctcttagctcaataaatgagccagacctcaagctggaaatgtaggttactagagacgatctgcaggttccagaggaggaattaataaactctgcattcaatacaggagagataactcagtttttattttatgcaggaagtaaagacttaagctgattcccacgaaagcagtcaagatgcagggaagaaggtattgagaacttacgactgccctgcaaaatatgtcctgaaaaaggactgatgttcctggagtccagaatgcaactggcaccagagcagagttgaatgattgttatagttttcttgtatcgggatcttagctcctaatgacagcttctgagaactactctggttgaaatatgaagccacaaaagggcattagtaggtgaagtctggacaattccttccatgtcactgtttctccctggctacctggtctccctgtggagacagaaatttagagaacagaattagaaagccaagaggggtgaggcataagggagagtcctccaaatgccgattcggcaaattttaactttttcagctataaacctttcaatacctcaaaataaatccttcaattttatatgagagtttggtttctgcagctgtagatttatgcagtgtgctgaggccaggccaaaagaagtgaacataaacgatgtgacagatagcgtaaggatgttattcagcttctcactccggcatggctcacttaagaactttccaaatgtcaagcataacccctctcactaattagctgctaaagcagctgatcttctgccatggacatgtgttccaactgcacaactgcaggccctcagcttgagaggtgctgcagaaagcagtacacttcctcaaccctggcctgggtctgagacacatagcccaacacatcaccccaagcatcactggtgcagacgcatctgttgaccacaggcctgccctctctgtgtgccaagtcctgcttcttggttgctcatgggaaatggagtactgaaatataatgtgcttcaggagccagctatatttactaggaaattatttaagacaacaagacagtgtagaacaaaataaacctatcaccatattgccttgattgaattgcttaagaataaattaactaatagtttttggaaattattatgaatcaggctctgtgctagttttctcctaagtatcttagttaaactttttaataacagagcaaagtagacagtgtcaacttcattctgcagaggaagaaactaaagatcaaagaggttgaatgctgtcttagtccatcgtatgctgccgtaacagaatgcttgagacagagtgatttattaggaacagaaatttattttcttgaggttctggaggctggcaagtcctagatcacggcaagatttacctggtgggagctacatcctcacattgtggaaggaagggcaggaggcccaaatgctttgtgaagcctcttttgtaagggcgttaatcccattcgcaaaggagaagccctcacggcctgatcacctcttaaatgcctaccacttaatactatcacattgacaacaactgaattttagagggtgcacattcaaacaatagtaaatgcctcacctgaaaagcatccaggtagacatttgacaaatgaccctgtctcctttatcttcaacatcatgtgattaacttgataattatttcaaaaatagcaacctataaataggaaactgaaaatttttatctaggtaaaatttttagaagagacctaagttgtttctcatccatgaaaaccatgaaggctttatcatcagagcttcaacaagagagtggaatttattaacaatgacttggaccactttttatgcaattttaattttttcatagtttcatgtgtgtgagttccacttctagccaaaatgaaataaaaagaaccatatttttttcaaactacccatctgacaaggggttaataactggaatatataaggagctcaaacaactctatagaaaaaaaaatctaataatccaatcaaacaatgggcaaaagatttgaatagacattccatgaaagaagaaatataaatggcaaacagacatatgaaaaggtgctcaaaaatcattgatcatcagagaaatgcaaatcaaaactacaataggatatcatcttaccccagttaaaatggcttttatccaaaagacaggcaataacaaatcctggtgaggatgtggagaaaagggaacctttgtacactgttggtaagaatgtaaattagtaaaaccactatggagaacagtttggaggttcctcagaaaactaaaaatagagctaccatatgatacagcaatcccactgctgggtgtatactcaaaagaaagaaaatcagtgcattaaagagatatctgcattcccacgttttttataactctgttcacaatagccaagatttgggagcaacctaagtgcctgtgaatagatgagtggataaagaaaatgtggtacttctacacaatggagtactattcagccataaaaaaaagaaaatgagatttagtcatttgagaaaacatggatggaactggaagtcattatgttaagtgaaataagccaggcacagaaagacaaacatcacatgttctcacatatttgcgggatctgaaaatcaaaaccattgaactcatggagatagagggtagaaggacagttaccagaggctgggaagggtagtgggggtgtgatgggaaggtggggattgttaatgggtacaaaaaaatagaatgaatgaataaggcctagagtttgatagcacaatagggtgactatagtcaataatttaattgtacattttaaaataactaaaagagtggaattggattgtttgtaacacaaaggataaatgcttgagggaatggataccccttaatgggattattatgcatttcatgcttgtatcaaaacatctcatgtaacatataaatatatacacctactatgtgcttacagaaatttaaaataaacaatttttggctgggcgccatggctcaggcctgtaattccagcactttgggaggccaaggcaggtagactatccgagattaggagtttgagaccagcctggccaacatgacaaaaccccatctctattaaaaatacaaaaattagctaggcatggtggatcgcgcctgtaatcccagctacttgggaggctgagacagggggattgcttgaacccaggaggcagaggttgcagtgagccgagatcgtgccactgcactccagcctgggtaacagagcaggactccatctcaaaaaaatcaataaataaaataaagtaaaataaaataaaataaaccttttttaaagaaccatatttgccttcttgtctgaaacaaattttaaaatgtgggacaaaaatacatgaagcaatggttttaaagacagtggacattagtcaatgaaggacagtgagccccaaaagaaggaaaacaacagaataaacctctataattgacccagcctactgcctgtagagaatctcaaaagtgcagtacaaggaagggggaacccagggagcttagcatttcctgggagttgaacagacagatatgattgtctggggaggatggtcagctagagtttgcaggacagactcacgtatacaaaatatcacatatatgtatatataatcatgtagggtgtgtgtgtatccaagagccccttatgactctctattatttatgtagtccttttgtgcatataaattttttcctattttcttagggatattatttatatttttgaaattttcttctgctctttgcattgtttctatgcctctactttactttctctctctctcactctctccctttctccattccgcaccctcttccccgtctttcatgtccaagtggaggcttctgtccatgcctggagatccttgcctatcaattcctgtatctgcaagaaaggcttttgagatgatgggcttcattgtagaatcaatgggaaggaacctaaccattttgtttagggaaacccccaaatatcaccatatccagctttctcaggggctttttatttttccagggaatcattgactgtctctcctgagggtactagaggaacttggcgtgtggataatgtacttagcatccagtattctattgacatgtcaatatgtaagccttgccctagtcctgtgttttccacatagggcaataccatcactcctggctttcagttttgtttggtgttctccagaaagtaaatcctgcctcctgttagggtaaggcttgggatgtgatgaaaaatgttgaatgctatcttttagtattttcatgtcctttactcttgccttccttcattctgtccttcgaaacaactgcttgaaattcactgtttcattaacataaacaagcttatttttaattcacatatttatctgcaggtgcatgggtttcagctccctccagtctgttgagtcatttagcaaactagttgccctgttcccattagctacctgttgaagaaatttcttgttcattgttttcacccttcctgatttttttttttttttttttttttttttttgagacagagtctcgctctgtcgcccaggttggagtgcagtggcgtgatctcagctcactgcaagctcagcctcctgggttcacgccattctcctgcctcagcctcccgagtagctgggaccacaggcgcctgccaccacgcccggctaattttttgcatttttagtagagatgaggtttcaccgtgttagccagatggtctcgatctcctgacctcgtgatcctcccgcctcagcctcccaaagtgctgggattacaggcgtgagccaccgtgcccggcctcacccttcctgatcttttaacctcatggatttaaactttctttgaaattgttttatgctatgttagtacagttttgatggaaaaaagaaatgtacatactatatgttgtattatatgtattcaaacgtgtgctcaaacaaggaggagtcagggtgcagaggaattgtttcctaaattattattagcaagcaatccaccttctgaagtgtgatggcctggactcacacccttgcttatctgtttattttcccattgtgcagatgagcaggctgagacttacaattattaaatcagttgttcaaggtcacaaagttatacttctatctcagggttgttatgagtatcaaataagatagatcacttagcatagttactatctcctcataacagtttaaaaatgttatctttcacgattaaacacctggtccttattgattctccaacttctgaatatggtgcaggtaggcctgcagaaaagtggaaagtaaaaaattggaaagatacatgaaggaataggacacattatgctcagctggggaataatggcatttcagtgaaagtaatagtaggtatgtcaactcaattgtagtacttaaatttagttttttgggtttttttgtttgttggtttttatataatcagctttggaaacaaaatgtgttgggaaaataatagaaaactaataattctttcaatagcataggctgaatatttccttaaattgtaagaaaaataaagcataaacctttaagtcgttccttgagcagatatctttagagtgtactaatgctgcatttaattatattttctaaaatctcttaatctgctacttttctatttgattttattttgtttccaagtaatatctgaaagttttagcctccagcctaaaaggcaggaataactggtatcagactagctctcctacaataaacaactagcaaactggagaaaatatatgaaacagtttttggacactgaacaaagagatgatacatggctgtgatccctgagaaaagagtaaaaataaaacgagacttgtgatcacagtggccttctgcctggaagcagtttctgaatcaggtgctgaaaacaagcaaaatacaatggtttccttgagcttaaaagacaaaaatcagagtttagaggtggctggaatttgtgtggctgagtatcagaaaggatggaatctatacagcagagacccagaatctgcatagaggtttgtttgagtctctggtcatatgcttagagtaaaattccacaaatctgaaaaaggaacaaagaacagagatagaacaacttattgacaagctatctggaagaaaatatttgcatttcatatatctgaaagaagacttcaatccaaaatatgtaaagaatacttacaactcaataataaggagctaaacacaccaattgaaaatggaaaatttggccaggcatggtggctaatgcctgtaatcccagcactttggcaggctgaggcagggatcacctgaggtcaggagatcgaaactagcctggccaacatggtgaaaccctgtctctactaaaaaaaaaaaaaaaaaaaaaaaaattagccaggagtggtggtgcatacctgtaagcccagctactcgggaggctgaggcaagagaatcacttgaacccgggaaatggaggttgcagtgagctgagatgtcactgcactccagcctgggggacagagcaagacttcatctcaaaaaaaaaaaaaaaggagaatttatttgatcagccacttcacaaaaaatgtataaatgaccagtgagcacatacaaaagtgcttattagacaaaatggaaatgcaaatgaaaacaaagaaggagtactttacagttactaccacatactagaatggctaaaatgtaaaagactgacaataccaaatgttgtaaatgttgcaaagatttggagcaactagaactctcctacattgctggtggcaacgtacaacaatgtaggagaggcccgggaatgactcttgctgtcccaatccagccagaggattctatgaagcctctccctcaatcattctagggaagggagacagtaacaataggatgtaattgaaccttcagggtcttggcaactgggaggagaaaaaaaaattacaagaaactgtcagtctctttgcaaaatagactggcagtttcttacaaaatttaaaaatgtacccactctgtgatctaagaattctactcctggctgtgtatccaagagaactggaaacataaatctccaaaaagattcctacataaatgaatgttcatagcagctttctttataataaccctaacttggaaacaacagaaatgttcctcagtgggtaaatgggtaaacaaattgtttatattcatacaatgaaatatacttagcaatttaaataagctgctttcaaatacagtgacaaaaagggatctcaaaatcttcatgctaaaataagatgtaaagaattcatggtatgaaattttagaacaagcaaaactaatccattatatagaaatcagatcaataattgcttggagcaggattggctggtaagggacatagacattttcttagatgaaaatgctctgtatattgacttgcgtaatgtttacatgaatatataaatttgttaaaaatccccaaactgtatatcaaatatcagtgctgtcttaaggtaacagtaggctgctctgctgagctcaaattattattaaatgtttcaccacaacacatttccatctactgaaccatttagaagatttttttaaaaagtggaaaaataagtgtgatttattgtaattaaatataattcaacaatgtttatttttaaatgtttatgctaatactcttctccaaccaagagtgatctgaattctaagggaggaccgaagagctttggtgcacaattaaagaacacttagctgccagaagaagatgaggggtctctgccgtgctactatggtgggaatctgcaaagtcaggtagggtgcattcccaagttaacttctaaatctaagggactgtattagtctgttctcacactgctaataaagacatacccaagactaggtaatttataaaggaaagaggtttaatggactcacagttccacatggctggggaagcctcacaatcatggcagaaggcaaaggagaagcaaagtcacatcttacatggcagcaggtaagagagcttgtgcaggggaactcccatttataaaaccatcaaatctcatgagacttattcactaccatgaaaacagtatgatggaaactgccccatgattcaattatctccacctggttccgcccttgacacatggggattattacaattcaaggtgagatctgggtggggacacagccaaaccatatcagggacctatgaggagtaaggatcaggcaactagctcatgatcagaagcatcaaaattagaatgagatatgaagcattcatatcaaaaaggagttaaaatgaaaaacacagaagatctgtgaccaatgaagaccagaaataccatttgtccttcctagtagaagaagggacaatatcataagttattagacctataagcacaaacatggtcaggctaaagaatgttaactgccagcagagaatgctaaaggacttggattatcctgccctctttactggtgactccttttccaactgactgactgttagttgcccgtgtttactcaaactatgttggtattcaaagttgagtcttctctgactgcagatcgagaacatatcccagaatatttctctctctgctacaaaaccatttgagaatagagaccagaaatcttgtcattataacagcaggaatctacagaaagtttggcattgaattccttcagacatatgttatggcaaatgacgtacaattatagggagaagtatgtaagtctacagcataggtgctaatcagtctgaacattttcttagccctgaatcccattcaaaggaaaaatttttcttttaaaagccatgaatcattaacatttcaatacactaagcttagatctggcaacttaaggaaatttttcagaggaaaggcacacaatctaagtgactgtcttaattacctgcatcaacccaattaatttgtggtgtatttcaagctgaaacaaaggcccaggaatgagtcttgctgtcccaacccagccagaggattctatgaagcctctccctcaaccattctaaggaagagagacaataggatgtagttgagccttcagggtcttggcaaccagaaagggaagctctgcctgagctcctatcagtgtggaaaatcacttcataagtagctacagtgaagacactgtacagagaatccaaggggcagactgtaaaacatctataaagggaaaatgtttaaattcttcttaaagatgagtcttgccatctgaatcaacagacggctaaaatgcaaaacctcctctgagatctttaacagcctcttggttgtatatggctccttttcccactataagtcattatcactgatggatcccaaactggatcctggggggatcccgacagccaggaggtatctacctactacctgagtgtccctactcctcaaatagttctttgccatgcttattccaccagattagaccctggcatgtagccaccagcttacagtaggcttgaacttgctctatgagatgccctactttgaactgttctgtgtaacaaatcgatacttacacaaaatagatgaaaacctaggtgacgtgtttaatagggaagctgagaagtataacctttcttggtcttatcacctgtaaaatcccccttagtccatttttgctgtctgaaaatccatcattgcaaggttttcttttggggggggggggggctacggttgaaaaaaatcgactaacatgcaaaaagcacacagacaaatcattaaatccttattaatcatcaactacttgctatgaattatcctgttctaaatgtttccaaggaaataaaggacaatttttacaggaagtgaaaatataaaccccatgcagtgaccaagtggtaagaagttaagtgagagtaaagaaattggggcagctcagggcaccggagatctagggaggagaaaaaaaacacatcaagaaaactaaaagaagaactaaacaattgtccaagacctattttaaccatttcacaagtttgcagactactctgccatagggaaaagtccatggtcaacacttctggaagagcaaaagccctagattacccacatcccaagctactttcagcaaacaactgagtagagtcaatgaaaagtcaccacagtccctctaggaatggtaacatgtagtagcttcaggccatggcatcatcaaatgtgggatggccaccagcccacagattagaggaagtgttcctggactggaaggctgggctgggctagatgggtctacatggttttattcgggagtctctgagaagcaacgtctgatttattgtagatgagccacagcctggaataaatgatatggcattttatttttttcatgatctgaaacatttgatacggtattttaaaataaataagacaattgtctatgtgattggggtgcctaacaaacaccaaatgctctgctagttctcattttcaataaatgcacaatctggtaactgacaagcaaacgaacaagaatagggttagtgcttaatagagaaatgtgcagaatgctaggtgagtctagaagagggtttcaaacacactctcagggacggctccgcagtgcaggctatatcctgctaaggataagctaaggcttgaaagatggaggagggtgaattccacacagagggagcagcagcgtaatctatccacaggaaggcaggcagaccagggtgcctggagtgtgtgagggtgagaggtgaaacggcaaaggataaagccaaagaggaagaggccagcatccaaagggtcttccttatatgtcccgctaagcagctcagggaagcatgtgtccatgtttgtatatacatcccaccttattccagaaaggattgaaagtggctgttgctaaagaacttggattgcattatgaaggcaattgagagtaattgaaggatttcaagcagggaatgacatgctcaggcatgcatttaagaaagattattcaagcaatgtagaaaataaattgaaaggggttcagggaaaggaatgagactttaggcagttaaggcagaatagaggcaattacaataatccaagggaaaaatgatgctggcctggactaatgcagtggcactgggaagggagaggactggagagatttaggcatatttaagattgagcagaataacttataagctagtggacctaacgatacttaatactacgggggtaaactgagtagaaagcaattactcaggaaatgtgtcttgatcgggaatctgaatgagggagacaaatgatctagatgatttgtgtgatattagacagcatgtatagcatgaaactaatacagtttcaggtatcatgagtttactttgaatttcgattcaaatcagcagcctcgtttcttttaagcaaagccttatttctctcaaggtacaaacttctgagattgtccacttgtcataggtactctagaaactacttagctcattcttcaaaagagtatcgttggtagcaacaccacagaacagaaaaacacatcataccatcaggtagagttcccagcatgcagaaactaggggaggtgattttctatgcaaagggaaacctcttcccagatgaagtgaacaactcacacagacctcaaatcaggtattatgagtctcacctgaaacctagaaggtaattagttctcaatgagttagacctgaaaccactttttaaaaacagtttttaaaaaacattttcattgaaataattcattttaatatgaatacaaaatttgagaaatctcttcaagcctatatgtaaataaattagagtgaaggaagaagggttgagaatgtgcttttgccaacagggagttattataaaagtcaatagtaaagatttccctttatggaaagtcaatacttttcttccaatattttcaatcaagacatcgaatcagtccctgaaaggaaatttaagctacagtcaaacgtgactctgttttaaaatatttatgtagcagtaaggggttattcaaaaaacagaaagatgatttaaggttaggttgtttgttatagtgttcatcaagtccataaatttaaaaaacaagctaaaaaagtaatcttcaaatatttcttaaagatatttgataaatgtcagtattacatggtatagtttggctgtgtccccacccagaactcaccttgaattgtaataatccccgatggggccaggtggagataactgaatcatgggggcagtttcccccatactgttctcatggaggtgaacaagtctcaggagatctgatggttttataaatgggtgttcccttgcacaagttctcttccctgccaccatgtaagaagtccctttgctctttcttcgtcttctgccatgattgtgaggcttccccagccatgtgaaactgtgagtccattgaacctctttcctttataaattacccagtctcgggtatgtctttattagcagcatgagaatgaactaatacattacatcttgatttttttaaagtaatttagaaataggtggacatttactcagcttgaagaatgatgtccccaaatcaatacctaacatcatccagattggctagaaaaacattcatgaacgctggaaataagaaaagggtgtcactattatttaatatcatactggaagttctaggtaaataaagtaaaaggtacaaatgtgtaaaaggagaaaacaaaggtatgattatttgtggatgatgtgattatttatgtaaacatgattcaattaaaaattgaaacaaaaatgtggggagaattcattttaaatagacagaattaatcaaccttctgtctgtagtgcaataatgtttttagaaaacaataataattgagggaaaaaagtgatctcattggaaatctgtattcacctagtttttttctcttcagaatcaatatacctatacaccaaagacacatcctgttgattttacaaggcactcattaacttatttcatatattctttaatttgttcaagaaacattgctgagtgtgactattgttcagctattatcgttcagcactagggaaaccatggcaaattcctgtcattttgatgcaagtattaaatacaatgtgctatcagagcataagagaggacataaactagtcttgtaggttagggtcacttgatccaaatgaagtgtaggggttatttaaatccatagaggtaagaataaaggaaaaggtatgtgtaaagtctttgaggcacagaagagcctgatactctggaagaaatgaaggcaggtggagctagagtttagaaagtgaaaaggaaagtagcctcagaatctcattagagagagaggaagaggccaggtcaacagggtagagtagactcctgtagcaattaggggttgcatcttgacaacattgagaagcaacccaaggttttaagtagaaacaagagagagcaaggaagtgatttagagacatttgggagggagaatctttgatgcttggccattgtttgaggtggctgaatggtggtgccattttctgagataatgaaccctgggttgggggtagagtgggagggtggcctgaagcaggaacaggtccccaggtaaatgtcagtaccactgtggttgagagagaacattcccttggctctgaccacccaggttcaaacccatctcaacccctttgcatcaatatattcaacattcaaatggtttgggggttcctcatttgtacaatggaaatgataataacaggacctgccttgtgatgattctctgaaattacacctctaatgttggacagaatgtctactaatgtgactgtcatcttgtaggtgttccttgggagtatggtccattgtgtttagacatatttattccaaaatgtctgcaaacttcctggaggggacaattaaaaggcatttggtggccaggcatggtggctcacacctgtaatcccagcactttgggaggccaaggcgggcagatcatctgaggtcaagagttcaagaccagcctggccaacatgcagaaaccccgtctctactaaaaatacaaaattagtcaggtgtagtggtgcatgcctgtaatcccagctactcgggaggctgaggtaggagaattgcttgaacctgggaggccgaaggttgcagtgagcagagatcgtgccacagcactccagcctgggcaacaagagcaaaattccatctcaaaaaaaaaagaaaaaaagaaagaaagaaagaaagaaagaaggaaggaaggaaggaaggaaggaaggaaggaaggaaggaaggaaggaaggaaggaaagaaagaaagaaagaaagaaagaaagaaagaaagaaagaaagaaagaaagagaaaaaggcatttggctattaaggcctggatctctggaaagagacttgggctcgaagtatgcatctggaaatcagaatatacatggtattcaaagtattttaaacaatgagaaagggtagattactaaataaatggtttgtggtataactgactagtcattagggatagaaaacaaagtaagattcttcccataacctgaacatgtaaatttaaaaggattgaatgttttaacattaaaacaaatggaagtgtgaccagcctggccaaggtggtgaaaccccgtctctactaaaaatacaaaaattagctgggcgtggtggcaggtgcctgtaatctcggctagagaagctgaggcaggagaattgcttgaacccggaggtggaggttgcagtgagcagagattgcaccactgcactccagcctgagtgacagagtgagaccccgtcccaaaaaagaaaacaaaaacaaatggaagtgttaaaatattactttaggataagaaaattatttgtaaaacagaaacaaaaagcaaaagccatgaaataaagtacagatatatttgaatgcattgaaattttaaacatttacatcaaaaatatgtacattttaaagggacaacataaaaagtaagaaataatctcattgaaaagtagataaagcttatgatcaggtaaataacaaaagaaaaactagaaactatgtcagcatcacataatagttgcctgtcaaactggcaaaaaaattttttaattaaaatctattaagtgttagtaaagatggaagaaaatatgtgctctaaagcaataattttataattctttgctcatttaccaataaaacaactttctgaaattataaatgctttcaaattgtaaatgctttcatatttcaatttttttttgtaactttaaagtgctgcaatattttaagtattggcatttaaaaatacaaatatttctctttcacttttttagtgttatgtaaatctaattattatttgatatccatcctcatgcatgaaagcctcttctttaggatatggaaagttagttttgttttctctttcagtctatattttatccctctttctatatttttatcctaatatattttatgcttctaccattgtattggttgtctttggaagcttgtctacaacaaccaaaaaaaatgtatctaatttgaaattttaaatagaaatttgaacgttttatttcctgtgaccataaatcttttttggactaagttatgtttacagttattagtagtctgtaattgagcagaactacatgcaagattaactattttatagataattactaaacataagaagtaaaattgtaatggatatttatctctgtggtgggcagggtaataacctcccagaaatatcctcacccaaatatctgaagctggtgaatgtgtttcattacatggaaaaagaaacacagcaaatagaattaatcttatggaccttaaaatagaaagaatatcctgcattatttaggtaggcccaaactaatcatataaatccttacaagtagaaagggaaggcagaagaattggtcaaacaacagaaatttgttttctcacagttctggaggttagaagtccaagatcaaggttctggttaatttggtttctggtgagggctctcttcccagtttgcagatggcctccttcttgctatcttcacaataacctttctcatttctctttcagagacagagagagagagagagagagagagatctgctgtctcttctcataagaacaccaaagggctcaccactgtgacctcatttaaccttaattacttccttggcggccctatctccaaatatcgccacactgggacttagggtttcaacatgtgaatttagcggggaacagaaatgttcagtgtataatattctgccccgggccctcaaaatccatgactttctcacatacaaaatatgtttattctatcccaacagcccgcaaagttttaactcattcctgcattaagtctaaagtgtaaagaccaaagtctcatctaaatatctggccaggcacggtggctcatgcctgtaatcccaggactttggaagcccaaggtggatcacttgagggcagcagttcaagatcagcctggccaacatggtgaaacctcatctctactaaaaatacaaaaattactcgggcgtggtggtgggtgcccgtaatcccagctactcaggaggctgaggcaggagaatcgcttgaacctaggagtcggaggttgcaatgagatgagattgtgccattgcactccagcctgggtgacagagcgaaacaccatctcaaaaaataaataaataaaaataaatatcatctgaagcaaatatgcaaggtacgattcatcctgaggcaaacaaaattcctctccagctgtgaacttgtgaaaccaacaagttatgtgcttccaaaatctagtagtggacaggaatagaatgtacatttccattccaaaagggagaaattagaagaaagaaaggggtgatgggactcaagaaagttcaaaacctgacaaggcaaattccattagatcttgaggcttgagaataatcctctttggttctatgctctgccctccggtaccactggagtggcagtgtcaccccactggctccatagaacagccaccccctttggctctgcaaggaggcctcaaccccacacctggcccactgaagccaaggaggaatcagacttacccctaggcctgtaggagcagtggaagtcctatggtctctgaattgccttaaaggtcattcttccctttttttgaaggacaatgcatgtttaaagccagatagctctacggacttgtcctgtagcatcccagaagtccaactgcctccctttgttctgtttcactttctctgtcctttttagttccaactggagtttctctgctgttatgattgcatctctttctggcttcggctgcaatggctgcttagacctgtgggtcacagccatgctaatatccttatcaaatggttgtttagccacacccttagtgttttcttcagaacatgctccgtcattttctgcaacataggctgaaagtcttccaaaatttcaagtactggctcctttttgcctaacagtcctttcaatatatctcccccctctcacattttcctctaagcagtaaggagaaacaaagccaatccaatactttgcttaggaatctcctcagctcaatacccaattctatcacttgcaagttttaccttccgcaaaacatgacaatacgattcagccaagtctgttgacatctataaccactttatggtacaggtggaatagctggctgctctctttactaattttatccaattcacacaggagtcccctaattctcccactgaattctgaattcaattttagaatgtctgatgtaaagggaacacagttgtgtgggttgttaatatttctctacctgtgggagaaacttatcacaaggaaaactgcctttcctccagcttccaaaaatgcattcttcatttccatctgagatctccccagaatggcctttaccatccatgtttctaccagcatcccatgcatggtgagagatgtattgtctaagatgacagagccttcctccatatctccttttttcttcctgaatgttcaccagaatcaccttaaatggttttagtcaagctatgttgccacccaatgaaatgctacatagaaggcattatctcaagatcaagagcagcttaaattgtaaacagataaataaagtgaccaaggacttcttcatggctgactttttcactggcctggacaaaagtccttacagagtattggttcaggtggaatagccgtctgctctcttgcttctctaattttattaaattcatgcaggagcctcctaattctccctctgagttctgaattcaattttagcatgtctgatataaaaggtaacacatctgtgtgtgttgctaatgtatttctacctgtgagagcagagatgacaactctgatggaagcatcttcatttttttaaaaaaggtgcaaagaagtaagtttttcttttcttttctttttttttttttgataatgagaagacagaaccttctgaggcacagaacacactggagaaaaggccatgtggatgagccatgcagagaggctaagctcccagggcagggaagggaggatgatgttcagagtccgtaagactaattcagggggaacacagggttgccaggacacctggagtccagccctgcttccccgctagttaactgtgtgacttaagcaagtcacttaacctcccgtttttattccttcttctattaaagaaaaccaaggattagattagatggcttttaaagattttgtttctagttctaaaattctacagttcttactatgttcagacattctttcgcagctctactagaagctccaccttcttttaataaattctatttacttgcaggtggttggactattaagaaaagcaaattgtttaaataatgtctgactttttgactgacttgactctcttaacaggccagatatatatgtgtatatatatataatttttttctgggtagtgaatttttaggtacatcaatcaagcagccagtatttattgcatggagctaattaactttcaaaatgacattttcatttgtaacattggttgagatttgaactcagatctcatcaatgaaaagcagctgcgctaataacccaagtcccaccgagccccctaattctcccagcttaccctcaccataaatgtgtgattaatcgcaggtttatgggcgttctcagttactgtgaaaacaaatcattaccagaaactggcattcccaatttattttatttattttatttttatttttattacttataccctattctccatattttccatatgttttgggtccttctcatccattcaggaccttgtggaaagctcagctcacccccatctcctgataaacaagaacattttgtcgttttctcttcactctttaattcttaaggtgtggaaataatggtactttgcaggaagacgtgagggaacaatgcagttgacagctggacagagtgaagacaaagatgtatgtggttgttcctcacttcaggtcagtagagcaaacacaaaacttcatccacctacaagattcaggcatgcaagaggttaggaacttggaagtgggcagagggatctgatagtggcttctctttactaaattctcattcactttcttactattatggtaaaaaaaattatataaggaaatctagaaaaacaatctaacctctttcctcttgttttcaagccccccaaatagttagatttaatcaagtttgctttgagggatctgtaacatacactaagacatgtagcgggaagtgctctgaaaatctgatggaaagagacacaccttactaagatgccaggaacagacaacacaaccaacgcagtcaaatataaccctaaatatgaagtcctggggggcagcctctactcccagtccttagtatccagtggcgtcgtctcttaactctgcaactctgtacacatcagcatttctggttgagtagcagcaggaatcaacttatttggcaacagtgactaagactcctcattaatatcaggtcagttgtttagtaagaatgtgtgagtgtgtgtgtgtgtgtgagagagagagagagagagagagagagagagaggcaggcttatgccttagactcccagatctcccaagtccttcagctttgtcaactgtgacaaaggtataaggccaacttttccatgattatctacatacattgccttgatcccctatcttcagaaacaggcaagggacatcgctcttaaaatatgtgcttcctaaaggaatgtaagcttcttatagtcacttctttctccaagctcctgaacttgcagaacgttccctctcatttacgtctcatatgggtgttctcttgtccccgtccaatataaacctagaaccaataccccttgacttgactttctccaaataccactatccggagccagctctgtatgatcagtgcataaagaagtttgaagttaaacaagtttgcaaataaacagtgaaacaaagtggtttcatcacagggtatcagagtaacccacggagcacatcactgtattaaaattccattggctggtggggggtggggggtggggggtggggtgcagtggctcacgcctgcaatcctagcactttgggaggccgagatgggtgggtcacttgaggccaggagttcaaggccagcctggacaacatggtgaaaccccatctctactaaaagtacaaaaattagctgggcatggtggcacactcctgtagttccagctactcgggaggctgaggcaggagaatcacttgaacctgggaagcagaggttgcagtgagtcgggatcacgccactgcattccagcctgaacaacagagcaagactccatctcaaaaacaaaaccaaaaaaattccattggccaatccacattaggaagtttctcactggctgtctctttgccttgtgcctctgattttgacttccttctttctctcatggccagcctccagcttcctcctcttcatggctggccattcactccttctgcaaaacactacagccctccattccctacctcaaaggcacctggcccactttagctgccccaacactcattcaggaggctctagaaaacaaaggtggtgttactttctaccatggtcaaattcttaggctggcccaacttccccagcagtctttgtaagcaaagaggaatgatatggaatgttatctccccaacgtgaataatatgagcacccttggaaggtggaactgccagtaggaccatttgccttttgttttgtttccttttctttgagatggagtctcgctctgtcgcccaggctggagtgcagtggcgcgacctgggctcactgcaacctccgcctcccaggttcaaacgattctcctgcctcagcctcccaagcagctgggacgccaggtgcccaccaccacgcccggctaattttttgcatttttagtagagacggggtttcaccgtgttagcaaggatggtctcgatctcctgacctcgtgatctgcctgccttggcctcccaaagtgctaggattataggcgtgagccaccatgcccaggttgtttctaacagtatattttgttttctacttaacatctctcagaagcactcacactcttgtgatctctttcttgtacacatgcatgcacacacacacacgctttaactcacatattctttttaaaacccacacaccggtaagcaacagaaatcgacgcactactcaggtcatccatactcttccagtgtctacaccaaggggacggggaaggcaggaaagaggaaagtcaaaaaaaaaagcaagcaacaggaaatgcaaaaaaatggaagtaggaggagaaaggaaggaagaaatgaagtaagtagtgtgttagtgtatttgacagcaaaggatcaaggagccatgggaaagtgagttttttgtttgtttgagatggagtcttgctctgtcgccaggctggagtgcagtggcgcaatctcagctcactgcaacctccgcctcctgggttcaagcaattcctctgcctcggcatcccgagtagctgggactacaggcatgagccaccatgcccggctaattttttgtatttgagtagagacggggtttcaccatgttggccaggatggtcttgatctcctgacctcgtgatctgcccacctcggcctcccaaagtgctgggattacaggcgtgagccactgcgcccggctgagaaagtgagttctaagtcggtgggatgactgccctgttagctgtttctccctgttacccatctggaccctagcatcatccctagtatggggccaatgtgttgacataaagccacatgcacagggaacatatgcttgcagagacatcacatggacacacatatggggctccccctcttcccctgcaaaggaagacagccagaggggagcaagattcctgggatgcagaaacaaaatacacgcagcaccaataactgacctcttttttctttttttataaattgtttggcctatgttaaaaggttataaggcattcagctgattctctgtgtgttaataaagaatagctttatttttatgttttccatgttgttcaggcacaacataggccagaagttgggactgcacaaaagaaattcaaaacatccagatcagggtctgtgcgtacaggcgaggaatgggaagctacatctacaggaggtctcttcttgtactatttccagcgttctaattcacccttttgaggtttagtaaagtaaccacagtagccaaaactgagggtgttaacacaaactaaacctcagatcccttaaaagcttcctcctggtgactccagagctcccgcataagccctccaccctgagccaccaccacccgcattgagatgagggctttggagaggatcatgccacagacacatctttctatgtgtgtgacacagcctctgccaacttgcagtgagaccttggaggccaaatataaccagttacaggagtccccatcctgtgtctacggcatctgtgtgtggaggaggggaggtttttccctggatgctgttacagctggggttagagatcactgggctccccaggaaacctggaaagcatcttactcaagctggcatttgctcctggtgatccttccctcccaccaaaatctacaactgtatctctcaggcttttgggccactcattattctcacagtaaaatttctttaatctactggataccacagcctccaaaaaaactcggacaatagggaaaatgagagagtagacacaaaaaacaaaattgataaatcacttgaaaactgtccccaaattaccggggaacattttttctttcaagttcatccttctgaagtatgaattgcatcaatttcttctccaatttcatgacactttcacctggattcttaagaaatctttgccatgttctagtttcctctaatatccctgtcttccatattatcaagttatcattctgcaaacaaacatctaattatattcatatcttttgtctttagtggttccctattctctataccaggggtccccaatcccccggggccgcacagcaggaggtgacggcaggcaagtgagcattactgcctaagctcctcctcctcctgttagatcagtggccatcggcattagattctcataggagcacgaaccctattgtgaaccatgcatgggaaggatctaagttgtgcgctccttatgagatctaatgcctagtggtggaaaaattatcatccacgaaaccagttcttggtgccaaaaaggtcggggagccctgctctgtagtatgaaagatgaaattttaaacacacgcttttcacagacattagaatattcacatgttcccaccgaggctatggacatccatgtcactattccattacacggtctatatgactctccttccggacgttcttccatttctggtattgacaaagtgttacttcttcaaaggccaacctgtttgaccatttgctctgtaaagtcttccgtaagccttcaaatagagatacttcttcctctcctcttttccttgatgtttgcctatatgtatcctattgtaaactcttgttatcttagctattagtttggctcctgtaatataaagtaagctcaaggtgagcataaaccgcatttttaggtcccagtgtaagacaaggcatataaaagatattcaataaatatgatacatatcagaggaaaatgaacgaattcataaacaaatgcctcattcagtggccctaaagaaaaacacacttggtttggaaagtgttaaagagtggttaatccatatgtaattctgtgcatttacatacatatgtaaaatagtacagttcatgtaaaaacaaatgtacagatacacatcaaattcattactttatatattctgtgggcacatgcatgcaacttgaatgtttcagtttaaaaaaaaaaaaagtgccccaaaggtctttcagagtcaggtctttctgtgttgttttggttttcctttttgattttctaatcactactagggattcaatgataagatataccccattttttagctatcctccttggctgaaagacagcttaaaaaaatttttttttttcctattaggagcaattgctgctatgaaatccttgggctttctacatccttgtgcacatatgcatgtttttcttttcttttcctttttctttttttttttttcctagacagagtctcgctctgtcaccagactggagtgcagtggtgcgaccttggctcactgcaacctccacctcctgtgttcaaacgattcttctgcctcagcctcttgagtagctgggactacaggcgtgtgccaccacgcccagctaatttttgtatttttttagtagacacggggtttcaccatgttggccagtccggtctcgatctcttcacctcgtgatgcgcccgcctcggcctcccaaagtgctgggattacaggtgtgagccaatgcgcctggccatatgcatgtttttcttaatggcaacacctgagaaaaagagctgctagttcataggaaatgtccattttaaatgttaataacttctacaaatttaccctacaaattggtttacaaatgtagctacttcaatctttctactctttcatactcccattttatgcttcaataaattctaatagatagcttctaaaagtgtagttccagatttttttcaatgaatgcttattaaacttaacatcaaattttcctagtttcattgctaacctttagttcttctatctcattagtttctcttggattcatctttcttgttgttatataacttcttataataccttcagagtgtttgcaggagtttgtcttattactcatatgtagaaagctatcttcctttcaagctcatgctcgaataatatcactaggtagagaattatgggctaaaataaattttcctgtagcattttaaaatttaaatttcttccagcatttaaagtgcttactgtattcttctgtctaacattgatgagaactcatatgtcaatatgatttctcttctattataggtaatctttatttttttcttatctgatagcttttgggatttttctcttgattctttctgttctaaaattttactgcaatatgtctagatgaaatagtaaagattggtaaataattaagaaactttcaaatatttggatgttttatattagatgagtgtatgaataactaaatacatacttactagctattatttactaataggtacaatataaaagggcatagaataacagcagaatggagctctgattttagcttggcactaataggctgtgacaactatctggatttgtaaccgctctaggtatcactgtctttgtgggtgaaatgagagggttataggaagtacctccaagatgattttcagtcataaaatgttgtgctagggactctgagtttttagaaactctaaaggtttttatgtggtcatttcttttttctcaagacaatatggaacctaaacaatatcagtgatgttgctgtttgttagagctatttctttgaaatgatttctagaaatcaaacatctcttaactctcttctcttgtgtctctttcgccagcagctaaatgtatgatttttcttaagtacaatagataaaatcaggagaatacaggagtataaaaatgtcgttaaatgtttcttttaatcttagagctgaagtaaaagggagtgtgtataggtgagtgaattaaaggattccatatgagatactttatatattcaaacttttgccaaaaggatacttaaaacattcacaaagggaattctaagaagccaaaagatttctccctccaaaaagacacaggaccccattgaattaaagcttccgacctctgagtaccaggctgcccctgattaaaaacaaatggaacacgtgctatgcagcataagtttacctgatttatgacttggaaaattaagttactattacttatggggcttggaagcaaaggcccaatgcaatagctaattgagagtagagaaggggtatatgctgaaattgggaaaatatattttagggaatggctgagtgaagacatcagggtatgtaattaaatggctttttaaaaaaaagtcacactcccaacaacctcttatatcaaacaattggaatgtgttagttttattaactggtcttctgccattagctccatcaagctgggtattatagagttcactttcttcattgcctatagtaaacatattaaaacttgcattaccaggtgtctcgtaataatggagtattcgtttaggagaaaaatttgcggtagttctccaataattaaaggcaatttgaaatgcaagcaatttctgagtcttggtaaactacccaaatgactaggtagttcctaggttcttcatagtcataacagtatgttttgatgagttttctgattcatcaaatgaatcaccatttaatcttaagaagaaatgttattttcttaggagttagggatcaggaagttctggttatgaaaggtcaaatgcgggaagacaggagaaggaataagactatgcacagggcccttgctaccaactctcattccagtgtaagtctactttccaagccactcagaaagttgcatggtagggaactaaaaatctcattatttcttacagttgggctgtgactatttgagtgataaaattgatgacatatggagggagtttttgtttttattagacgatcaattattctagacacatggctgtaatttgttctaataactactgaatgtttttgaaattgaagggtgatgctgtctaatcataataaaaactgattttgctatcattgaacttagttactgaggaaatatgaatatatacttatttaattacagtgaaagaaaattttggcaattgagagttattttactaattaagacactaaaagaatatttctctaacctaaatctctcttttaaaattcatacactttattctatagtcatgattcttgtctagggatgattttgccctccaggagacattcaacaatgtcgggagacatttttggtagaggccaggaacgctgctagcgatcttacagtacacaagacagcccctaagataaaaacatttgtcaacccaaaatattggcagtaccaaagctgagaaactccaaaggaacttttaaccattcagtatatagttcattaactcaataactgaaaagtcacataaatgcaaactgattactattactctaaatggactccatttttaaaaatgcgatttacatacaatttttcaggagcacattatcgttgaacatgagatagagctgtacagatttaaacccaacaaacaacgccaaaagaaaacccactcaccataccatctgctgcagggaggaacttgaccaaggcctgacctggcactttgcccccagtaagaactcaataaatgctcgctgaaagagtttttaaataatcaattatttgttcaaaatataaggataggctttcttgagaatgtctatgctttctttttaataaagatctaaaatgcccaacgggagaaaaattcattcctaaagaaactagatttgtatcttattcaaatttaaaataaaattattttttaaaaattgtttggttttaagattgttgagttggttgaaacagaaagtagctccatggctattttaatcacagctctggctctgtttccataaaaaacactgactgtttccagatataaaaacatttgcacgacctccagagggacgttccaaagtagctttctgctgtctgcaagacaggctgtgcccagggacccacttttctctatcaatctctagcaagaatgaagtcttcactttagctcagtagcctgggggagaaaagatgtttcacacccactaattaggggctgtcaggtaacccaggtgacccctgagatgccaaggtaatgaattgtttggtcacgcttcctgccactctgactcagagatgctcacacaccaaccgcccatctatgagtctctaaccttttggaggttttccgatcatgaattttgaggagtaggagaagccagagaaacagtggcaaagacaaagagatcctgaaaggcctggaaccagagaaatcaagagccagagacagctgatttgggatggaagtttccagcctttcactgaagtatctctcacacatgtataaacacaaaaagtgaaatgtccttaagcaacaatctattagtttagtgtatctagctgtgtgtaaacatctagaaaccatgcatcccattttcttgctcacctgacttaaaaaattggctccagactagtataagcaatttttctttatgacaaaggatttaaaaagattataagaaataaaggtagaattaaatattaggataacaaggtttggagtggaagttaaagatgtaacaacccctacatccctccctatctatctatctatctatctatctatctatctatctatcatctacctacctacctacctacatatctacctccctccctccctattcctagtctataatgtagaaaaaaagtacactaacatttcttcccatgggcaatgatactaatattgtatttttggcagttttatctgtacttgaaaataaattaatggctccccaatgaaagtcaagtgcaagttaaagatggaaaataattgtattaagaaaaatgcatcatgcggacttagcgaatttttaaaagatattttcacaaaaaactactgaacctaacttcacttgtgagtcacggcatagagcacggggaaaggtcagtcagtacttatttatcaaaagtgagtaaataaggttgatgccatgagatgttcagttgtttgaaaagtaagaaatccagcctaatgtctgcttgtgtaatgagtttagccatgtgaaattgctgagtttttaggccaacagtaaatatcaacaattttacaaagtttagctttgtagcatcgtttttttaaaaaaaattgttagacaacattttaaatctcccttcttactttccaaatcatctgtgaaaaggaatcttcaaagctaaatcctatcttcccctactgttggcatggaaggaaatcttagaaataattttctcctccgtaggcatctaaaatgaattttatttcaagaaagaaccaattatttctagataaattgggattatgtaggaaatgggcctgtgggtccacagccatgttgagcagagtaggcagagggcaaggagaacaaggaacggctaacactcacagagccagacctgattctcactttttgacgcatatttactcatctaaatctcacaagaaaccaaaaaaatggtatcattactggccccattttatggatgttgtaacagaggcacaagcaagttaattcttctaaggtcacacattagtggatattgagacaagattcaaacctaggcagtctagtttcagaacatacgtacttaaccccggcactgtacttttccccaaacaataccctgtcctccttctatatccccttcctctgaattgcctttctttttttcacctaactccatctggtgaatacatttgcatgggctcgtacaattattctttgtctcttgctgctgcaatgacaggttgctgacaatatgaactgtgtctgtctcatttgttaaggcgtcttcttctgggtctaaatgtgggagatgctaaatcattagttggtggagtaaattattgtgtgaatgaatgaatggtgtattccaccctaggctaaggaacaagggaagatttaaagcatcaagtcattaaattgaagcataaggtgccaatcacaggcaagacacaacaaaagggattgggggcccttttgggtcagtctctggggtgagtctgcggagggcacattttatactctgccttggaatgagcacatgacatcaagccagttgggtcaaaaacgtgttccattcttgcctgtgtgcctgatcctcaccaccaataccaagagagcagctttacttttcagctgcttcccagcagagccaaagcactgagtcatgcacactctccttctgatgcatttccaagaagattgtccaatattcagattttgccctgtggcccccaacccagaaaatttccccatgcaatccaaatggcaaaaacaagaattgaacctgtgccttggtcctgattagcaccaaaaggtggccaaagttctcactgtggagagtggaaatacaaacaagcaaggtattgcataattgaatgtgaaatgttttcatgaatttaaatgagaagtatttaaacaaatttacacttttctggattatgattctgactgcttactgaagttgcagaaaaaggccaggagcagtggcttattccggtaatcccagccctttgggaggctgaggcagaaggactgcctaagaccaggagttcaagaccagcctgggcaacacagcgagatcctagctgtacaggaaatttaaaaattagctgggtgtggtggtgtgcacctgttggagcctgggagttcaaggttgcagtgagctgtgatcacaccactgaatttcagcttgggtgacagagttaaaccttgtctgttaaagaaagaaaggtgcaaaaaagacaacaagataaatgttaaacaaaataggacgatggacagccagggcccatgcagactcagatgaacacattcctacagatgtttctgtgggaagagaggagaagaacgtgggtgtttgtgctcattttcacacagccctttctttatccccaagaaaaagaaatattacatctggagcatttcttattcttctcttggttcagagtaaggatgctttcatgtgtacatgcacacacaagcatatgaggaagtcggggcctattaagtacggagaccccatatggttccttcatacctccccctattccagagttgaagcaatcatggaaatggacggagtccagagtttattcctcaaactacatgttcagtcttgagctttatttcttttaaccaaagagtcgttataagcaataattatgataaaagggtaattagatacagatttaaggataaatcagaagaaaacacagtgaatcctctgcaattgaagtccacatgcactaattcaaattttacatatttcaattaaaaaataattcgtgctgctctatctccaaagcccatttcggatggcatactgcctgccagtgtttggagaactctgctactgagggtggttaggtgggtgtattagtcagttctcatgctgctaatgaagacatacccaagactgggtaatttataaagaaaagaggtttaatggactcacagttccacatggttagagaggcctcacaaccatggcagaaggcaaaggaggagcaaagtcacatcttgcattgtggcaagcaagagagagcatgtgcaggggaactccccttaataaaaccgtcagatctcgtgagacttactatcctgagaacagcaagggaaagacccacccccatgattcaattacctcccatcaggcccctcccatgacacatgggaattatgggagctacaattcaagatgagatttgggtggggacacagccaaaccctatcagtgggtgtggaccttctgcagctgtcacagcatttaccccaggaaaacgtgtgcctgtgcatcgctctgtgtgttcaggtggttttcatttgtcagtacacattctcatagattgcctcttttctccttaggtactgctggaggattgttagatataagctaattccttactcaaccatccattgagcccgttagatcccaagcaagcatgtcctactcttaggatacaaagatgattcaggcagggtccctgtcctcaatacttcacagtaaaatggaggaaactaggccgggtgcggtggctcatgcccataatcccagcactttgggaggccaaggtgggcggatcatgaggtcaggagatcaagaccatcctggccaacatagtgaaaccccgtctctatcaaaaatacaaaaattagctgggcatggtggcacgtatctgtaatcccagctactcaggaggctgaggcaggagaatcacttgaacccaggaggcagaggttgcagtgagctgagatcccaccactgcactccagcctggtgacagagggagactccatctcaaaaaaaaaaaaaaaaaaggaggaaactaaccagttacaaaatatgatcaagtctggcaagtactgcaatacaaataaacatgggattgcatgggaacacaaagggatggggactgcagaagctgggtggagattgacagccttagagccacagggggtctgaaacttgtttggcctggatgctgcatatcatatatatatacctgaatttgaagacacttagggctttgaactcaacaatttgctgcagtccccaccctgcctaattgccttcatttacttgggtggccattgctggtgacagaatgagaaaacttgttgagttcacaagggaacgaagaagcaatgtccaactggctaaccctaggctctacgttagccacaaggaggaagggacgggacttcagaagagcaaaccttctgtgaaatggagtgtgagtgtgaatgggacccactgctggaaaagtcacatggagttccatatttctgaggagggacagtggagaacactttaaagaaccactaaaaattcacagtaactttggaaattaattatatatataaatataattaacatatatatttctatttatatattatataatttaatatattaattacatatttctatttaatatattatataatttaatatatattaaatagaaatatgtaattaatatataattaatatattatgcattaattatctattaaatattaactttatatcatatattaaacaaaataaattaatctaattaatatataaataaaataaattaatctaattaatatataaataatataaattaatctaattaatatataaataatataaattaatctaatatataaataatataaattaatctaatatataaataatataaattaatctaattaatatataaataatataaattaatataattataagatagataattatatataattataagatagataattatatataattataagatagataattatatataattataagatagataattatatataattataagatagataattatatatataattataagatagataattatatatataattataagatagataattatatatataattataagatatataattatatatataattataagatatataattatatatataattataagatatataattatatatataattataagatatataattatatatataattataagatatataattatatatataattataagatgtatattatatgtatttcctgtaaatattatttacaaatatatatttacttcttcacagccatttgctatagatttcaaacaaggcttttgtttaattttgttgtgttttcccttttgaatacagggtctggattggggtcaccaaatcaaacacaggatgcccaaatttgaattccaaatcaacaatgaatttttaaaatcaaagtatgtcccaaatatttacataggaacatacactaggaaaaaaataggccctaaatattacacgggacttacttttaatgaaaaaaatgctgcttctctgaaattcagaattcactggatgccctttattcttgtctgtggaatctggcagccctggcattcatattggagagcccctcagggcggtcctgtttccatgacgtagcttgcagttggacagacattcagatgctttcagaaagcctagggagtctggtgagcacacattaacatcttttagcccacaaacagctccctgttcagtctgcaacctcttcccaccctctgatatcactccctatccttgggccacactcccagacatccagagagcagattagaaggaaagtgggtgtgaacaggtaacgctgagaatttggaggctgagtgggagagagtaggtgaggaagagggtaaattgtcaacaaaacgtcagcagcttgctggtggaagttcaacaatgaccatgttgctttaatacaaagtgtgggccgggcgcggtggctcacacttataatcccagcactttaagaggctgaggtgggcagatcacctgaggtcaagagctcaagacgagcctggccaacatggtgaaaccccatctctactaaaaatacaaaaattagccaggcatggtggctgcatgcctgaaattccagctactcgggaggctgaggcaggagaattgcttgaacttgggagacagaggttgcagtgagcagagattgcgccactgcactcactccagcctgggcaacagagtaagacgcgagactctgtctcaaaacaaacaaacaaacaacaacaacaacaacaacaaagtgtggcccagatcctgcaaagccatccacgttttggcctatcatggttccatacagaagaaagtggccaaggagtctgttctagatgcaactcaatcccaacacagatgaggtggctcctttggagatatttccccgaagtgcaagcacatcactgctcacaagcactggttaccaacctcagaacccggttgccggcagcattccaagcagttgacacccttgcaacaaccgttttccattttttctcgaatccagccactgatccttgaattagtgtcgtaggagctgtcttcagaatagagcaagaagggaccctgaaatcgccagaggcattttgactcaatcttccaacgtggaattaaaatcttaatctaatttgagacagttatttggggaatctgtggacttgtcataaggcagataattaaagcagaactaagagatttgagcctttctttgtgaggaaaatgtaaaaatgttggagtaatttctttttttatacatcccatacaagaaaattacatgatagacaccaggcaatgtacttggtctcagtaaccaggctgggcatgggggaaaagggaagaaaataaaagatccttttccatcaagttgttagtagtaatgctttttaattatttattttgcccttgtcactagccaacttgacaaaacacactacagaatacagttaaatgtatttactttatttcttttaaccaaagagttcttatagcttataaacaataattatgattgataaaaggtcaatagatacagctttaaggataaattacaaggaaatacattcattctttcattcattttgagacagggtttcactctgtcacccaggctggatgcagtagcacaatcagagctcactgcagccttaacctcctgggctcaagtcatccttccgcctcagccttccgagtagctaggaccacaggcacatgccaccacatctggctaattcattattactatttttttgaagagatgaggtctcactatgttgcccatgctggtcatgaactcctgggctcaagtgatcctcccacctcagcttcccaaagtgttgggattacagacatgaaccaccttccctagccaatgatttctttttaaacccatattcactaattcaacttttacatatttcagttaaaaaaaaaacaaaaactcatgctgctctatctccaaaaggccaattccagatggcatactgcctgacagttttaggagaactctgctactcagggtggttagaagggtgtggaccttcccccagtgtgaggcctagagcagcttacctgtcatagcatttaccccaggggaatgtgtgtctgtgcattgctctgtgtattcagatggttttcatttgtcattacacattcccatagattccttatcttctcttcaggtactgcaggaggatcattaaataaaagcaaattccttactcagataagcacaggattcaccattttgggcatctaaataattttttggccctaaggccaggcaaacaccaacgttcaaggatcagagaatcatattctttccttccaccattcatcaacattaagaaaaaagaacgttatgtgtgaggaacaactgttctcatttgggatgccagtagaggacttgaggttcctaaggagagagtcagtagtttcatgtaactcacgcagggaacatgggatggggtggaggtggcatttcctgaggtcctgacgtcatgtcactattttttataggaatcctcccactctttgtctgagaacttcattatgtccccttctggagaggccctaaggaccaacagagaggcgttgttctaccctgggtacggagactccaagatcttgttttgaccttgagcaaatcccataaagtcttgggactccattttaccatctacaaaatagaaataattctacctgctcctcccaacctcacagggttgttttaagggcaaaaagttaagagcatcaattttaaagcattcagaagtcacaattaatgcagcttagcattcatgtaaaaatgacttattattctgacaaaagtatcagcattcatcgatttttgtcaatggacagctattgtataatcccctgcaggcatgcctagtcccattatacaacagattgcttttatcttctcactgactgcctggaatattcttctgtcatgtagcatcatggtaagtttcctcaccttcttcaagatttgctcaaataccatcttctcaatctcaaccttatcttctgctctattttactcaaattacaacacatccctccactcctggcatccctgatactccatgcactgctacatatttatccatagaactgatttcttccaacatactataaaatatattgtgcttaatataattatgattgaaataatacgttaatttgtatcataaacacgtcacttattatgtagatgatctattgcctgtctctgtttcacaagagcagagatgtctgacttctttattaaagtactccaagcttactaaggccagggcctggcacaaagcagacacttaacaaatatttgttaactagtaaattaaaaataaacctgaggacattcagtgcacactaactatatgaactccgtgttccttggcttagaatccaaggccatctgcaatgtagtctaaattaccttttcagtaccatcttcctcttcccactctttggtttccttctttcataagcacacatcccagctaatctggattgttccaaatatcctgcagaattgtgtaaacgtttaaaaccttgtctcttttgcttagaatgcctactccccacatgttctcatttcaaatgctatttatctttcaagttcaaatgccttttcttctatgcagcccttccggattttcaaacaaggacatcatcttcccctcttcttaactcagtgcctctagtatggcccttatgtttacattgcactgtagttatttggaggcatattagtctgctgaggctgccataacaaatgccactgggcttaaacaacataaatatatttcctcacaattatgaaggctagaattctgagagcgagctgctagtagggctggtttcctctgaagactgtcttttttgcttgcagatggccgtcttctccctctgtcttcacatcgccttccctctgcatgcgcctgggttcaaatttctacttcttataagaacaccagtcatattggagtagagcccctctaaggacctcattttaacttaattacctctttaaggtcctatctccaaatacagtcacattctgaggtactggaggttaggacttcaacatatgaatttgtggggaacatcattcagctcctgatgggctcctatcccttgctcaaggagctgcaagttcctttaggataggcccttggtctcatctatttttgtaacttgcaagcaatctagcacagtttcagacctaattatttcacaaaaactgttgagtgagccatgtttcccagcacagtcttacagaaaccagagtatatgatgaagattctcttgactccttcatttcttgctcttggcaacacctgccggatcaacaggatcttcttgagttcctcttgacttagttctttatcaattttcctttcctccaagtttgctcccctaaagatccattcccagttgaagaactatttgcttcttcaattgctttttttgcaaatgagaataaattaagcatttattgtaactaagcactcttgcagctttcaatgagggcaaatcttatgtgaatgggctcacgtcataggagatagaatatggttaaaatttagtcaaaacttctacctgaacaatgttataactaatcattctaagaaaagttagaacctgtctattttgtatttagtacttgttgactttgaagcacatggtgtccttgacaacctgtactttaactgtaggatttctaaagttctaattagaactttagaattgtgtactagaattgtgcatttctgtcaaaacatgaaatgccattagctaatacaggattacatcttgagaaggcattcattgaaagaactctaaaaacctgtgtttggtgatttacaatatgactactgtgagcctggaaacacagagaatacttaattttctggaaaatggttgactttttatagtacaagtgaaagatctcacgtagaagttcagttatatattaaacattacagttagcatttacgaacagaactgtgactcccaattttctgttactgaaacaaacatacagcccctcagtagtaccgaggccacggaagtaatttcttgtgttttttaaaaaagcataccatttggaagtttatgctgaagaacaagagtacccaaagctctgaaattaaacaaaataatccctgcagtaaccttgaagactaggaagtagtgtttacaggaaacagaagactgggttaggctagaaaattttaattatagatctgtttctaccagacatttctattgttttggtgaattgggtaactgataattggtaactgataattgggtaatctttgggcttcaatatcttcctctgtaagaagaaagggcagatgaaataactgtgatccttaaggcaaggctgaattgtgacctttgggaacttctccatgaatttggatcatattgcaaaaccgttctccacttgatggaaaccccattgattatctcaaggagtacttagatcgggtagagaacaaaaggcagagttcatagtacgatggcaaggaaaaaggtcccaggacacgccctttctacaaggaaccatgaccgtgaacagggttttctaatcctgttagtgcctcccacctgctgaagtgaagacacttagactgttcatccagaggtcccatggtgaagacagtaaacacccacaagacattgtgatgatgaaggcatattagtaaaacaaacttaaccccttaggtcacactatgtcacctcccagctattttataaggtgtgacatgtaaaatacaataaccatgaagatgctgttgaaaccataggtcaagttcacatggaaataatgaagtcaagaggaaaattgactacttttccccaaattcctagataaatggtatattggtcctgcattgtttaagcatgcttgtcctaattagcctaattttttgtgaatttattctaaaggaaaaaatctgagtacctctatagcaaatgctgggagctgctgacataggcattgcctaacagctcctagaaaaacctgcctgttaccattcctgataggttgaacatccatccaccagctgtgaataaaagaccacacagccttcaagcaatctgtccatcagggaaagccccatatctggtcagatcgcaatgaaatttatttgggttattttatattagcaaggtgttttcttcttcttttacttggcaaatctcatcaagccctaggtgtgcaaagtaaattgattattaagagttgacccactaagctttcagaaacatggaacatccaaaaagctcattaagttagacatctattaattgaatcctgttggctcataaactccaacagaggagtatctcaaagtttatagagaaagtaataataattatgcatggcatcaggcaacaaataatctactttccattattatacattgaccttttcttgacatttcatatgaatagaatgatacaatatttataattcttaacatgtcttttgcatatgacttctttcatttaataaaatatttttaaggttcatccatgttgcagcatatatcagtactttgttcctttttattgccaaataattttccattgtgtgggatactctacattttgtttatccattcaccgattgatagacatttggattgtttacattttgaggccattttgaataatgctcttatgaacatttacatgtaagcctatgtggatatatgtttttatttattttttggtaaatacccagaagtaaaattattgagtcatggtaaacttacatttacatttaagaaactgctgaattattttccaatatggctacaatattttgcattcccaacagccatgtaggaggctttaggtatcttcacattcttgccaacatttgttattatctgtctttatcatactgtcaagagttttggcactcagcttatattttggtccatgcgaatctggatattctctacgtaaataagtatgcacagcaagaaaaaaaatttttaagctattgataaattgccataagtgtatgcacacttaaagacttcctgatagtccataatcatttcctctattacatcaaaagttcccaaattacaacctgtcactcgctttaccatgtgaaaataagctattgttcttctctctgcatcttaactatttgattacctccaatgttgcctagtatgaaaaagtttcaattgcagccaagaaaaaataacccagaagtggtgaaagaagaaatgacaaactggagtttttcaatagacacagaaaagtatggagcctgatgtttctaaaaaggaaatggaagcagctcaagatcatagctgcaaaatctaggctgcgagccttggctgcttcgcatttcatcagttaccagtggctccactgaaatagaaaggttagtcattactcagtggaaagtttcgttgaagaaaaaaacatatatacttatggaatatcttgtccagaccacaaatcactttacaagtgacaatcaattaggacccataacacatgcacaaggcagttctaccccatgttgcagcaaaaccttgctgaacctaattatttctttggacagatatttggaggagagtactgggacactgaaatttcatgaaaacttttttagaacagataaaagccacttatgcatgttgaggggaaagacatccctttgtttaagccacctagaaaagtagcagaatacatctaatagatttgtcatacattataagttcctcctctttggggaatatgggttaagtgagactcttcccacttggttttaagacatttaatggtatttttctcatttttataatatctaactttgaccaacacagactagtaatagtggtagactctttagtttgcagcttattcaacaaacagttattgaacactaactgtatgcaggcattgaacttcctagaattgtcaaatcaagtattttttttctagcagtagtgtcacagcactaaggttgctggcagtcggtgctgacaaggttgggcatgggaggtggaagaaccacaagacaggttaaatcatgaaacctttgtggtataagagaaggagctaaacagagaaattccaactcttattctctaggtttatgacatcattagtgagtccattaagtactttgttgatgttggggtgttctattccccctgaaatccagaacttttccagttttggtcaatgcttgagccatcaggccaagtgctattttcagctccggcagctcccttgttttgtgagttcagcccagacaggaaaccacccagtctgggaaggttcagttagatcccaaaagagcacacacactcaggtgcaagatcttcaaggcagcaaaggatgttacagttaatcacaccctgcctaagaagtgaacatgcagtcattgtttttccaagagatgaatgctacttagtgtgtgtgtgtgtgtatgcatgcaaatattccgggtagatctaaaaggtgttttataaatcctgctgctctgctccatgtagaccatgtagatttcccatggatttccatagagaatcggtgaaaagcttagaaatagttttactctagaaagcctttttcccccccccactggaagtggctctgattaaaatttttatgtgtaggggaagaatgtccagcagattttgtaaatggacaaactctctgccacatacagaactgtggtctaggatttggaaaacttttttaaggtgttcttgacttacaaggaaggaagcttatctgaggctccaattaaattagtccatctggcattgctggtcctaccaatgccaacagtggcgtcagagattaaggaagagaggaagagggtactaggagacatcagatcatccaaaagtacatgtgatatttgggacataattatactaaaaaattactcattgtttatctgaaactcaaatttaacagagtttcctgtattttctctggcaactccatcattgatactcatcactcacctttgtgactgaggactaagctctgtttttgttttgttgttttgttttgttttgttttgttttgctttgctttgtttttgatcttgcccaaattcctatctaaggggtccagggagtcaggccctataaaccataaattctcactagatgggttttactaaaccctatatattgtgtcctactttccaatctgactctggcataacattatgagacaaggaagaaaatcaaaatattttccccccaaacatgtttctttgccatatcctgaaatggccctgaaaagctgtccttggtaggggaaaatgtgtatccataaataatctgtgttaacttagttagatctttttcttccgggccttcccaatcctgaagagattaagtaagagcctagcaactttttgaaggtctgaataggaaacatttgtcatctattgtctccaagggctgccactataagacttcaaaaggaccttggtctccacagtcttttattttaacctgaacatttcctttctattgatcccaggtctttagacaaactcaaccaattgtcaatcagaaaatgtttgaatttacctatagcctggaagctccctgcccccaacctttgaattgttccatctttctgaaccaaatcaatgtgtttcttaagtgtatttgactgatgttcatgcctccctacaatgtataaaaccaagctgtactccaaccatcttaggcacatgttctcaggacctcctgagggctgtgttatgggccatggtcactcatatttggctcagaataaatctcttcagatattttacagagtttgactcttttcattgacaggacaatcctcctgcctcagcttcctgaggagctgggacttcaggcatgcaccccatgtccagctattttttgtattttttgtagagatgggattcttgtcgtgttgcccaggctggtctcgaactcctgggctcaagcaaccctcccacctcagcctcccaaagtgttgggattaaaggtgcctggcctgtttgatctttatttgccccaagggcctagagttcaaaacaaaatagatcatctactaatgctcattggatgagtagatggatggattattaatataactcaaatctttaattcttctaagttccatatttcacattaagtgtccaattttaagttcattggggaaataaaatcaatgagaccattcagttacatgaattaagatcagactatttgatatgggagttagtttctgcatttggcaggttgataccaaattggggtgaagtgctctcttggaaggtgaaacgaagaagttctattcaatcctgagtagctaacacctattgacgcctcattataggctactatatctttgtattaacatttaattctcacaaaaccctaaaaggtaggagactaactctctttcacagatgagaaaagtaagacacagagaagttaagtaatttactcaacattacacagctgttaagtagtattggaatttgaagccaggcagtctggcttcaaagctagtatcatagtatcataactatacagctacgcagcatctcaaatagaaagatactaggtatttaactatgctggctccatagctttagcttcaggaagtaagtgaatttttctggaatatctatgtctggccttctttctctactagccaatactattcatgaatagagctgtcagagtcatctccttctgcaaccctctctctccctctcccccatataaccctcagccaacattgcaaatggctttccgaaatagtgacaacatacaagagaaactcccaatggaacttatgccccaatttcaagagttgaagtaaatcctccttccctccaacctctgccccagaaaagagaacagggtagaaaagtagaaacaattcatgcagtctaagaagacatattttgtgaaacttggtgcttgttgagtggagaggatgggactgaagatatctcacagactgtagactcaagtccaataggtaaacagagacccggaaagctggacataatttatgttattaaaagatgactcaggtgatctcaagtgactcataccattcatgttttgaggagaaaatgattttggaaaatttcttaaagtcatttcacatagagaactataaaaatattaggtgtcacgctattttatctgcatttgatggagatgtaatgtgctttattattcaatttaaaactaatattttaggtgatgacaggttgagaagactggattcacagaactggaactggaaattatcaactgggaaaatctaatgcagcttgactgatggctggaaggaacagtaagcttgaattagcattttggaaagccaattcatcagctgtcataagccaatgttaaggggaaaaataaagtgttaaaacatgagatctttcacttagaaagaaggaaaaaatgctacaaaaggccaatggcttcatattaagagacatttccaaagaagggtgtccaaagtatatcctaagatttgtttttttccagaactacttctaaagaaaactaaataattattcacttgtaatgatttgggtaaaattctcactggacaaatagggataaccagaatgatgctttatttcctaagattatttgaatttcatgtcagagggctttcagttcaacgtacagtgacctgtattcatttctattccatcatctacccatatcttgccacaacagcccactggattttggtgttccagggcttaaaaacacagctgagggatctgctacttcagaaacattgaaaatcactggcactgtcttgggatatcaatgtcctatgttccatgttcctcaacaaaacaaccagatgcctcaaatccacaatactttcaacattctgagtatagtgaggaagaagagaaatgcctgctctatttaaccaacaccacccaggccatagggtcttctcacggtcaagctcagtagatacaagcaaacccaatacaggatgcagtagggtacatgatccaggtgtgtaattgcccaggtctgttgatccatttcatctcatcaggatgcaaaacctcattttctcaaagcaaaactctcagcttcactcctgggtggaggtgagggggagcatatagatcaaacacaaataatgagaatgcagaacttcctgcacccacctttcatggaagggaaactcttgagtaaccttatcaaagtggatatgaccaaggggtaccattctttatgctttggatctgatgcagtctcaagtcaaattgattcccttattaagaaacatcaagaaaatttcacacagaaaacactgatggtacagggagataaaggatggaataggaaaaagaaaagaaaaaaacagagcaaagcgggtagagaggtttcctgaagccttgctcagattgagactctgaatctctgccagaccatgtgaggcttgctgttgtttttcaagtctctgtttcattaagaccaggagttgggcaaagttccctcttgatcatgaggccaatctgcttctctgttattgctaccattgagaaggaaagaaaaaaacatatttggcattatagcttagacaaatctacatttcattgtggaagatttgtgttcattcaactttactcagttccgatctgttccagccaaatcactttttttatccttcttcctcattatagtagggaacaaaaggaaaagacaggagatagagatggaaatagagatagagatagagatagagatagagatagatagagatagagggggaaagacaggggagaaatagaatataggctccttacggcccagtgaattctgcccagccccctttgaagtggtacatttcctatatgtgttcaaagatttggaatttgggttaaactgtttcttgatcaccagttgtttcaaatatggaaagaaaataaggagtcattatggcttggttgttttttaaagaaataaaaaatcttttataaggctgaatacaacacaagtaggactatcttggtttctaccctcaaaataaacccttgtttctaatatgacaaaagaacttcgttttagagcgattatatccattacactattccatgtcttgatcttttaaaggaatgttaacagaatgtctcaggcttgaccagttgtagacaataattatgcctagcggttccttaagatcctgtgaccaaatgattcatggcaagccccgtttagcatttatcagtgtatttgctagtggcacaaaacagtccctatttcaagagaactcttcgatgtgaagctgtagaccacagaagatgaaagacagaaaacctggaaaataaaaacctcatcttcgaaactggcattagccgactgtaatatttaaaaacaacaacaaaatctaaataaataaagtagggctacaagacttcagttgaaaccagaaccagttgtccaagtgccttatcaggaatgatccgagccccgagatggaggtgaagtgaatgaagtaagcgagctagaaaatcagatcctcagaacaggcaaatctacccttctcaggttcttatgcatttggaaaaggtctactgcatttgggattatttgactttaaaaaaaaagaaaaactggtgactactgacttcattttccttaaaagtatagatagatatgtatacacatatagctgtacaaatacacattccaaataaattagaaaatgatatgattagtttagcatggtggttgcagtcacttgcacgaaaaaaaaaaaaaggaagaaagatctaactgcctgtttctggctatttaaggaatttaaaggactccacacaggtttatcctagtaatgcattctgagtttggaaacttaatatccgccatcctgatcaaaaatgaccaaaattgatgtgaccaagtctctgaattgtagaatatttcagagcatgttttgaatattacctagtatttgtcctacacagccagaaaaggccaactcaggaggcaggggttgggaaagggaataaaaaagaagaagaaagagtagggagtgcaggaggagaagtggggaagaggagtggggagaggtagaaaagaggaaaagaaataaataaaaattactggccaggcacagtggctcacgcctgtaatcccagcattttgggaggccgaggtgggcagatcacaaggtcgagagatcgagaccatcctggccaacatggtgaaaccccatctccactaaaaatgcaaaaattagccaggtgtggtggtgcgtgcctgtaatcccagctactcgggaggctgaggtaggagaatcacttaaacccgggaggcggaggttgcagtgagccgagatcgtgccattgcactccagcctgggtgacaagagtgaaactccatctaaaaagaaaaaataaagttacattatgatacaagaaagaggtgatttatttccaccaatcatcgccaagaacctgatattttcaccaaccacagtgcaacgtgcatgatttagatccagcacctttaagccgcttacctaatgaatgattcatacctcagatcaaacccaagctacaagtagcacattgaattaacttgagagggataaaagaacccactgtaagctctcttccactcatttcaaaatgaactccaaatctctttggttttcttaggagactttcaaaaactgacctgtcagtagcacactgagacttactgcatgaccagaggatataaatgttaggcatggtacattttttttcctcaatgcatttgactgtataattgttataacagttttttcttcatccatatttaccttagcagacaaattacaagacaggaattctgaaaaaattggcacttacttgatatcaataagtcagtgggagaagtgtgaagtcttatcttgatcagaacattctcattgactgcttaagtaaaccacatcaccagatgactacaccaaccccacctaacccaacactgctgtatgctgaaataaaacacaagccagaataagtgtctgaaccacatacttcctgggtgcctactgttctaagcactatgctggctgctgggcgaataaaagctggtaaacaagagaggcatgatcattggttttacagatttttcatctagagagtgagaaagtcattcaggaaatagtcatccaaatgtgtcaagtactgtgaagggcaagtgctgggtatcgtgacatcataaagtggaaggacctaatttaggtaaggtagaaaggggaaagatatcagcaaaggtctgaacttgttacaaaaaccttattttccattgcacactcaaaatctcacaaaagtgacataaaagacaatctgagtgagcaaaggagtgagggttgattgattcattggagttttaatttttatcttgtttgaaagtacctttttttttttttctccaggtaaatgggatacaggattccactgagaaaacagaatcaacaagagagagtagacagaggctttctgaactggaagtcaacatgaggcagctaccataaagccatggagtaactatcagtgagtttctgccatcaggtgggaagaattctctttgcttatgtcatggtgaagggatatcaggtgactgaagcagaaattcacccagaagccctgaagctggaggcacatgctttcagtctttattgcaattctcaggagcccacatcctgttttctcccaggctctgaactcatctgcatagtcagaatgttccttccagctctgggtctctgtgctgggttgggaactattttaatagccccttgatgcctcataggtttactatgaatggcattgtgcaagaggggcccagctcctggtgtctgttaaattatactactattttgcaccttgaatttccatacacagagcaaaatgtaaagccctcagtccttcttacctatagaagaaccaagactaggactcaggcttcctgattccttgccggaatccttgctaaagcgtttatttttgtatctgtgggtagcaaggggaaaaaggtaccttatcttttccagatttgaggtttgtaaaatattatgtgcccttgtctaaattgcagtgtcactttctacagtatatttgtattattaaaaattgatcaagttaaatgactggtaaaatacgtggtatagcaccaaacaattgccgagtgagcttaaatgcatttccagtacctgctgtcacaaaatctcctgtgagcatcaggaaaatgctaaggttttatttaccatagtaagagtcatcttaaacatatgcaaaatgcatttagcctaatataggctataagtggataactgtttaaactaaatgtttcatttaactgcccttattaagtgctctaagaacacaggatatagaatcacaaattgcagacttggaaacggtcatccagtccaaccccttatcaggtgtttaaatgtctctagtgatagaggtctcactacctcctaaacagcccattaggcagctttgaattttaaaagctgcaatccagaagagcaataagaaagaaaaaaaaaagtctccaactcgacttcaatgtacagaatagacaagttaccaagaatacaaaatggcattttaccaggattgttaaatgaagaaatcatctgttaaataaataaaacattgccttaaatgggagcagagatgatgtagagctaatacaccaagacgttagtttaacaaatgtttattgaatatttattatatacctagcatggctgtaggcattagggataaaataatgaataaaatggactatgttctggtagcttgtaatagaataggttgtgtaaggatggtttgtacaagtaatgatagtaagcagtttttgtgctacatgccaagtttcaagttttgttctaagcattttatgtatgtttatgtatttgaacttcatgacgatcctactgaaaggtactcttattaccctgttgtactcctctatatgagaagactggagttttccccaaagtcctgaaactagcacatgaagagaccgtgttgttcatccaggcatcttagcttcaagcttcatctcttagtcatagtgcttggctgtcttttagaaaaggaggggagggccaggcggggtggctcacgcctgtaatcacagcactttgggaggccgaggcaggcaaatcacctgaggtcagcagttcgagaccagcctggccaacatggtgaaaccctgtctctactaaaagtacaaaagttagctgggcctggtggcacgtgcctgtaatcccagctactcgggaggctggggcaggagaattgcttgaacctgggaggcggaggttgcagtaagcccagattgggccactgcactccagttccagcctggtggatagagtgagacactgtctcaaaaaaattaaaaaggaaaggagagagagagagaaagaaaaacaaagaaagaaggaaagaaagagagagagaggaaggaaggagaaggggaaggggaagagggaaaggagggagggaggaaggaaggaaagaaaagaaaagaaaagtaaagaaaagaaaagaatagaaaagagaaaagaaaataaaaggaaaagaaaagaaaagagagagatgttgcatgcggtggctcacgcctgtaatcccagcactttgggaggcagaggcgggcggatcacgaggtcaggagatcgagaccatcctggctaacacagtgaaaccctgtttctactaaaaatacgaaacattaggcgagcatggtggcgggcgcctatagtcccagctactcgggaggctgaggcaggagaatggtgagaacccaggaggcagagcttgcagtgagccgagatcgcaccactgcactccagcctgggcgacagggtgagacttggggaaaaaaaaaaaaaagaaagaaagaaagaaagggagggaggaaggaaaggaaaggaaaggaaaggaaaggaaaggaaaggaaaggaaaggaaaggaaaggaagaaagagagagagaaagaaagaaaagtaggggcgggggtgttgtttgatcaaaggggaactactgaggctgtggggtggaggcttcctggaggaaataaccatgatgtatgacctgatagtcaaataagagaaataaatgaagtttgctgcaggtggaggcagtagaggggagttcttctgccaaagcaataacaggtacccaggctcaggggagtaggagagcccgacatgtataagaacagaagggcacagggtgcccagatcgctgaagggcaggagggccaggattaagtacaagctagatggtgactcagtggggatgagttcactttttgttgcttggatcattccttcatttatgaattttatttatttatttcttgagacagagtctcactctgtcacccaggctggagtgcagtggcatgatctcggctcactgcaatattcacctcccgggttcaagcgattctcctgcctcagcctcctgagtagctgagattacaggtgcacgccaccacacccggctaatttttgtgtttttagtaaagacggggtttcaccatgttggtcaggctggtctcgaactcctgacctcgtgatccacccgtcttggcctcccaaagtgctggaattacagtgtgagccaccgcgcccagccaaatttatttatttaacaatgatttatttactaagatgtgctagtcacccccacaagagctccatctccagtgcccctgcccataaggtgtcccttgttctggatgatatgaggagatgaaggaccaataaatacacaaacaagcagtatagctttgaagatggaagacagtattgtaaatgtgtcttttctttctaagttaatctacagttaatcaaggtggttaatgtttgcccaatcaaaacaccaaaagtatgctttgaaacttaaaagaatgattctaaagtttatctggtgggcaggggagatgtgcaagaagaaccaacaattttctcgaaaacagatataaacaatttggggacagaactaccaggtaatacaatgtatcactgggccatagtaactttaaaaagaggtaccaatgcaagaacagacaactggccatcacattgcagccagcctgaacttaaaattgacattaaaaaatcgtttaaaaatcatcaatgattggtgaaaacagaatatcacgttaattttcatttctttcatttccattaacattggatgtcttccatgtttgttggccatttgtttttttgtgtgtgaattgtctgttcaattccctttgcctatatttctgttacttggggtttatttatagatttgagatttttatgtgacaagaacattaaggtttggtagcatttctctgttggaaatgaacccatgcattcattttaatttgttgacacaccagtacttacaactatctctagccttgatgtgcacacatatgtacttgtgcacacacaattgcttgcctaatcattgttctttctccacaatgataacaaagatgaggcaactgagtaagacaaacattatcatggcacagtttttgggatccaacttgagccaaggagtgaaatatcaacaatgtagcttccttttataagaaacctccggatacctgaaaaagacataaagacttggacacttgaagaatgtgtgtcaattttaagaattttttctaagcacttatcattcaccctctttctactatctatccttgactattaaaaagtgcacatatgctttatttctttctaaagattatttctgtacagattccatgatattttagaggagacaagtaattaaatgggtagcctgactctccacttgtctaatatctgagtaaataaacaaagaagtctcccagcaatgcactcactcacaacactaaatccactgtctatgattctccctccctcagagttgattgacttctatcctccaagtttcttctagggttgggtgcccactggaatcctggattacagcatgtggtatatttatctactgaaatatgagctgtgggtacaatgagcaatgccttgccacagacaccccatccatctgctgaaaataatcaatctcagaaaataaaagtccagggaaaagttagatttgggtacatgccgaggattaacaagggcggaacggcagttattttattaacttggaatcagtgcttgcaaatggatttggttatttaccattggtctaaaaaacgcatctgtcatataaaggctggagtttcagtctgcacagcagccaggcagattatacagagtcgcctcttggatgggaaatgatgtatttgtcagtgatggttgtttattcctactcctgaagtaactcatgctccagattgatcaccttgtttaaaggaccatcacaccatctccacatgtttcccttaagcttaactgaatatagtattaatgacaaataataataatagctcataacattcattgagtgcccgtgatataccagaaaattcagtagcaacaaaattaaaatctcatttagttctcctaagacccctttgaagtagttattattacatttcatttgtggactcacttataagccaaggctcaaagaatatgtcaccagtaaattatggaaatgaagatttgaacccaagcctccacgactctaaacccagccactcttaagggagcaccacaccattagaaagttaggcaagactgggtatttgtcccagtacaatctcccttactggaaaaataagaaataccctccagttttaattatgccgatctcagattgacaggatattagctaaccagggtgaagagaaatatttctaataacatcatctctcctggagagttggggaggtagaggattaaaatcctaagtgactctccatacattgtgaagcttaggaagataatgcacatgaccaagccccaccattcctttgggcaaggctgtctgcaggcattttgcctttttacccttgttcatgggaagagctgcctgagccacaacatactctcatcacttcccaaattaggtttccatacatttattcctgagggaaagaatctggttcagatgtgatggttaatactgagtgtcaactcgattgcattgaaggatgtaaagtattgatcctggatgtgtctgtgagggtgttgccaaaggagattaacatttgagtcagtgggctgggagaggcagacccacccttactctgggtgggtactatctgatcagctgccagcatggctagaatataaaaagcaggcagaaaaatgtgaaaaagaagagactggcctggcctcccagcccacctctttctcccatgctggatgcttcctgtcctcgaacatcgacctccaagttcctcagttttggaactcagactggctctccttactcctcagtttgcaaacagcctattgtgggaccctgtgaccatgtgaattaatacttaataaactcccctttacatatatatatatatatatatatatatataaatatatataaactccaatcactttttatacatgtgactccaatcactgatcactataatttatatctatattgctatagatatatacacacatatgtatgtatatatatgtataatatatatacacacatatgtatgtatatatatgtataatatatatacacacatatgtatgtatatatatgtataatatatatacacacatatgtatgtatatatatgtataatatatatatacatatcatatgacttctctccctctagagaaccctaatacaaggtggaaaagtatacgtaaaagaaaaataagaactggaagcaaaaaatgaggagaagcagtgttgcagtgggctctctaaatttcatcttggataataacataaactctgagtcagcttgacttggctgtgaatccagactctaacttggaaaactgacttttctcttcatctatagaaattagggagaacagaacctgttgaatggggttgtcatctggatttaatgagataaagcaagtgaaagcttggaacatcaaaaggattcaatgtaggacagttattgttatttttattagtattattatgttctgtccatcccccttttagcatctatgatacatgttgcagactttccttttcacctgcttcatatatcaaagtgtcacagcctcttatttttgcagagttggcaggacaggcttatggtgagtaagagagaattggctttcctgcttgcttttaaaatattttaccaaccttgttcagtttcagatatggccaatgacgaatgaacttattttcatcattttttcatctgaagtagaagcagaaagaatggaattctgatggtccagctattctcaactccttttttttcttaatataaacaatgaatagctcctaacttggcatgtcagccacccacactctgctatctgatattgaggcagaggtaccaactcctttaaagatctattttccccctataacatgtcaggttgccatcttcaacatactattttcataatgcttttctttaaaaccaattgaccaaattgttgaagaaaatttgggggaaaagatgtaggctggcaaaacacagttcttaaaaatcagagctggaaggaaagatgtttaacttggaataacgataggagactcacacagaagcacaaggggttgtagctggagaagaaggcaactggaagaggacaaagaaaagtgacaaagaaaagaaactcagagagcctgcctgagtttctggaggttaacccaacctgctcaaggaaggcactttattttggtgcagaactggatcaccactattatatattcataagcatagccttctgattatattcgtacaaactggagaatcacttccaaagagttcgtatgccaaaacagtgtctttcaaaagagggttcacagagataggcaacatgattcactgccaataaaaaactcagatcagcaacattatggaagaaaaatccaattaaaatcaacccgggggtttcctctgctgacgtggaatcacaaattatttttcttatcccacacagagagacttttccctgtacagtcccagaaatgaagccgaagtgtcagcttcaatatgagaatttaattctacatttccttcagcggatcactaattccaaggttcagcatgcctaaatgttctgtggttgagtagattttagtggtctttaagagattacctcaaatgcaacagactctcaatacaagaccagaaatattttgaaagaaaagaaaaacactctctacttctttataatttagctttcaagagcttaaaattattttaaaacatatttttgtatcaaaattgtgccagctttcagacatgggagatgtcctcttcttgttttgcagacaacgtgtcatcagtcaagtatttattggatcttgagttatgcatagcaatgtgcaaaggcagttggagaacacgataaagagggaagagctgcctgccctcagtggacttccagtttaattggaagccctttgtttcatgtagtcttctaattattattattttacttcttctggacatacaattgtttgacatacaatcaaacaacagaagaatcttatcacttgacccatctcaattgtataggatgactccaatcactgatcactggaacttactatctgtattgcaactttttttttttttgaaacagggtcttgctctgttgcccaaactggagggccgtgatgccatcatatttcactgcagccttgaactcctgggcttaagtgatcctcccacttcagcctacagagtagctgggattacaggcgtgtgccaccacacccagctaattatttcttatttttatttttttgtagagataggctgtctcactatgttgcccaggctggtctcaaactcctgacctcaagtgatcctcttgccttggcctctcaaagtgatgataggtgtgaaccaatgcacccggcctgtattgcaactttttacatgaagttgcccaaggatgtttattttgtaaggtgagggacacaaatgcatatgtgtccacgagtgaagccaaaatcagtgagcagaagcaaaggagagggagagtgccgagcagtggcaagttaggtcagaaaggaggtaacgggcaggagtagggctgtgaagagaggaaaagcattcattccaagggaagaaggtaatagatgcaaagacacgaagtgagaatgagccaggtgtgcgtgacggctgggaagccgagtgggctagctgttctctttgctttggcgaagataaagttgtgcggagacacattcgcactgaactttaaagtgtaggaaacagaaagtgttttgtccccttcggagagtgtcccattttccactcaggccacagccctgactcggcgatcctccttcaatgggcgcttatgttctcgccaggaagggcagcccttgctaaatgttatggtttggaaggatccttcacaaggatggaaaaccgagttaattcaattaaggcccggggtcctgggctttgaaccagccacagtctcaattttatgaaaggatgaaaagttaattatttgccgagtttgagtgaagtctactttgaaaatccctttccaaaagagtaatttccacatcggcttccctgtggaaaatcaaggcaggttgaaccagggtcataaagagaacctcaggaactggtcttcagagaggtccagcacccagtggctcgcctgtctccataccacattcgaagggctgggtggtgtctgaagcctctgtttgtccccacaggctacttcgaaaaatagaaaaggaaatataagttgaattcagaaagtcaaggtttttagggtgcttttttttcttttcttttctttttttttgagacagagtttggctctgtcacccaagctagagtgcagtggtgtgatctcggttcgctgcaacctccgcctcccaagttcaagcaattctcctgcctcagcctcctgagtagttggaattacagacgtgtaccaccacacccggctaatttttgtatttttaatagagatggggttttgccatgttggccaggctggtcttgaactcttgacctcaggtgatctacttagggaaggtcttaatagttcatttgatggagggtttcacttcccaactggcagcttcctggctgcttttaatgttattgttttatttaactttaacattttaactttaaaaatcatgtacacatatgtacatacgttgataatataacaataaaacaattattctggctgggtgtggtggctcacacctataatcccagcactttgggaggctgaggtgggtggatcgtttgagcccaggagtttgagaatagcctgggcaacatggtaaaaccccatctctacaaaaaaatacaaaacatagccaggcatggtggtgcatgcctgtagtccgagctacttaggaggctgaggcaggaggatcacttgaacatggaaggcagaggttgcagtgagccaagatcacaacactgcactccagactgggcaacagagccagaccctgtctcaaaaaaaaaaaatacgtaaataaaacaatttttctgatgtagaaaatataaagataaatcattcataagcccactggccagataataggctaatggttttggtgtgcatacttccaaaactttaaagtatttataccctgatatatacacacacacacacaaacaccacacaggaataagcatgggatcatatttaaatagttatccttttggctttgttttgcttttcacagcaatatattatatcagagatttatttccatgtaaattgggatagcataagaataaagtgcatgggttctcaggaaaaaaaaaaacaactttgagttaactgagaaaacttctcaatgtttttagccccagtaaaagtacaaccagtcgctggtgtggttctgtggcttcaatacaatattctctgtaaggctcttagtacccaaacataataaatgctcagtgtttttgtctttgcatcaatgaatatagatttatgtcttttttttaatgacagcaaactattctgttgcaattatggctgtaacaggatttgttttagttcatccttgatagacatttcaattgtttctaatttctcactcccatgaatggatctgcaatgcatattccttatatgcaactttcacagctttggtgttgacataggcaattagaaagaaatgctttctgagagtaagaaacatcattcatgccccttcctcctcaaaagagagattttaaccttactaataaatgtgcgtgggtaattcctaggaatatggtagaaatgctactatagaacctaaatccaaggaaaagaacattttcaagtcaacacctcctggcaagaagagtggacttaaaataaggagaatccagttctagctctgctgtaagtttttgatcaaccccaaagaaatgacaaactctctaggcctgctttctctttcgtaaaaagaagctgagtgaagtgaaccagaagtttctttccaaatgactgtggaattcatactctgcgtgcattgcttgacaagaactcttgccatcaatactatgacaaaacctaagtcctaaacaaactctgggctaggcctaaaggattccattgtcatttgtgtctttgcattcaattctagcgaaatgagacaaaatgacatgcaaaatgcaagtttttttttttttatccacatgctgaacactgggcaatagatgctgcattctataacagaacatatctatgacagaagtttataaaaaacgagaagtgcttagaaacatccagcaaacaaattgctgaatcttaccacatgcaagaaggatttcaaagagctgtgggggacattatgaagttaaaatatgatttcttgccttaaaattgccaccatgtggtagaagaggaaaagtatgcccataaaatgatccctgaaaattaaaaggttgattatttatgattttatacctcacctggttttaaaaaaggacttaaagacacttcagaaagtggcatatactatcctaaaggctttcaaataagttagaaaaataatacttacaaaatggcaagtacgggtgcaagattaagaatggaataatgttcatgcacccaattcattccatcaaatgctgtacgtcacatctttaactatgaattctgccattcaatccagagaaaagacagatattacacgtatttattaataacaacaaccaaaatcattgtaataacagttaatgctcatatagggtttactatgtgatgtggccgtcaatgctttaagaattttccatatagattaattcatttaacctcatgataaactacaaagtaagcactgtcatcatccccaacctaccaggggagtatcaggcagagattggtcaggtaaattaccgagggtcacccagctgggaagtcacagagttaggattcaactccaagcagttttcaaagtctctaaacttgaagcgtcacaaaactcttctcatattacctccaggttatgaaaccaaggaaggggggttttcacttttgttttatttcttacacctttacaaatgctccagtttctctagaagcaaatatgttaatatattttttataatcaaaaaaattaattttttatataagcaagcaaggcaggataaactttgggcctgttcagcaaactcaccacaaagaaacaggataatgagtcacctgtcatggcagggtagtcagacagccttcctggaagaggtaaatcttaaaggacaggtaaggctggggaagaaagaatgggggaaacaggaattataggtagagtagtatgtttttcaagagcaaaactgagctcctgagcaaaagtcacaggaaaattcggctcaatccccacacaaccaaaagacgttgaccttcctgtattgatagatcaaagagagaaaaattaactcaaagaactacacattttccttgcacatattttcatatatccgcaaagactccaatgtcctttcaggaaaatggtaaccattggggcctgtgtgctgtcttcgtttttcctttttcttcccacttatccattcctaaagtcacaaatctatgactcagatgaaaatggcatagcagcaaagggaggtgttgaggagtgggagagagaaaaagaggtaaaggcaattagtctttggatcctgttccttggtgatttctgccatgacaccaaattgcaaagatgcaaaaaccctctcattaacagcctggtgacggatatgagaaaggtcacccaactgaagctactggaggctccttgtctctatgaatcccaggcaaaccagtaaggcccggctaacagatattttcagaacattcattcacttcaaaatcagatcagtgaaaggttgagaatattctctgggaaatctggtctgcctttaagcagagggttctaaatgcagtcattgacgcagtgattaaggagaataattatctcttccctttattctgccacagagaattgctagaggccaagaaccgattagtgctggctaacaaatcctactctacccctcctacatctccctgcacccaatgtctcccaaatgaaaatggacaaaatatttttcagctgaactaattcatgaagctataaaactagcagccttacttgccattcaccatttgggatttaaaaactcaagaataggagattagacagtgtcttggctttatatgctgttactacaattaaataaacagccccctgtgtgaattaatcgccttggtgcaggctaaaatagtgcaagaatctaggcgagattttgaaaaatgtttagactgatttagatcgactaggaattgctaatggtttttatagctaatactttcaactccctccatccaaagcaaacacgcacacacacacacatccctcaggaaagcaatggttgagtctcagttgtgtaaacttggtcttgcaaaatgaaattttttatctcttgcacctaaacatcccaacatggctctggagacacaaagactgaaatgaggatgatagtcttttttcaaaattgaaggcatatgttttataacccacctggtgttcattttatcatgagatcttctaccccagccttcaagtgattgtcaagtagttattgaaataaaacatcaatgtgataaaatgactacaatttacatgaagacagtcagagaatcttattcctgagaaaatctccagcctaaaaccgagaggttcaaaatataaactccaagtgcttttaaagactcccttaagaaagtggagagatggaattaaagaatagcagtgtgtgtgtgtgtgtgtgtgtgtgtgtgtgtgtgtgtgtgtgaagcctatcatactaattttttaaaaaatttttttcccagcttcattaagatatagttgacaagtaaaaattgtcaatatttatggtgtcctatatgattgttttgatagatgcacacattgtgaaatgattaagtcacactaattaacatgtccatcacctcaatatcattttgtgtgtgtgtgtggtggtgacacttaagatctactctcctagcaattttcaagtatacaatataacaacagcatagttgctagaaaggggtcccaattcagactccaagagagggtccttggatctcagggagagtccacagagtaaagcaaaagcaagtttattaggaaagttaaggaataaaagaatggctaagccataggcagagcagcactgtgggctgctggttggctatatttatagttatttcttgattatacgctaaacaaggggtggattattcatgagttttctgggaaagaagcaggcaattctcagaactgaggggaaccccaccaccacctgtggcctttttagaccatatagggtaacttccagatattgccatggcattggtaaactgtcatggcactagtgggagtgtctgttagcaaactaatgcattataattactgtataatgagcaacaaggacaaccagaggttgctttccttgacatcttggatttggtgggttttggctggcttctttactgcatcctgttttatcagcagggtttttgtgacctggatcttgtgttgacctcctatttcatcctctgactaagaatgcctaatccgctgggaatgcagcccaacaggtctcagcctcattctacccagtccctgttcaagatggaacctcaaacaggaacccctgttcactctggttccaacgcctctaacatagtcaccatgtcatacagtagactcctagaatttattcatcctgtctaacttgacctttgtaccctttgaccaacatatctgcattcccaccatatcatgttaatttgttttcattaaaaaataaaatgagagaaaaattatacccaatccttatcggaaaaaagatacagacgtgctgcctctgcagaggtggcctgatgatcccagcaaagagaatagtggtgctgaattcaattagcttaactcttgcaagaaaagaatggaaagccgtatataccacaagcagtgcatgtgatagtcctggggattatcgagggaaaagaacgaaaaatgaacaagttcagcaggaactgtgatagcctggggtaatgaaggagagtgggacgcacttgatgaaagccccaaacacagcagcaggtggagaagttgttgactttatttagcattaattgcaggaaagcgtctataaaatgtggtcaaaaattattaaacccctgatgttatgccaacattatgccatcccctgttccaaggcaggtgtattattcctggtcccaaggattaaagtaaatcatggcttttccatgtattctgaatattgcatttcattattttttactgccctgtttctctaggtttttgtggcttaataggctctgctatttataaactcatcacgggttccatgttgggggagggaatgtcagaaaaagaatgtccgttcaacattccctctccacccttaaatctctatgtgaacatactctatatacatttctggaaaccactcaagtcaaacatatttacagtgatggccacagacacatctctctcctcccactggatctgggacacttgcttagatttaagagactgatttcaagatactcacttgtggttatctgaagaaacccagatttgcatacttgatgcccaaaactttgttctagaagccacaaaactatgctaatcatttcaaacaaaaggggagcttgagtttacccacaaatccaaaatgaatccaagcatactttttgtctgtgacagggtcttgctctgccacccagacaaacttttaaaatctcaattaaaaattaaaacattcaagtagcattttgcagaagactctcagtattacccaaatattcctgaaggccccaaaatgatgagattctacagatagactgagaaaataaaacaatgaaaagcatgcccgagtcatcttgcgaagccgctgtgcacactgaccagcccaaccattggccaacaccacccaggacccaagagtcataccaggcagaaaacagcagcctcacttccttatgtgtcctgattggggaggtggccaaaatactgtaactgcaagccccttctcactcccactccctattctccctgttttctgtatctttttatctttagttctcagaaaacaaacgtacaggcagtcaaagaataacctgaaaatgtttctttgcctcctaagatgcagagcagcaggcggagaaatagagaacgagcagcactctagtgacagcacagcccggaagtggagctggacgtgcatgccagtggcacttgttcaaatgccagtcgtagtgcagagggtggaggaagagaactcaagcttgcaatcatgctttctcagtattcccagatttttttttttcctttgttacctccctcccaagaaaaccttgtagatttgtttcccctcattgcctacctccccatgaaatgtcatgccacagaaaaatggttatatatgtttttacactcattcacaaagaaccaaattttgtccgcttggtagtatttatcccccctcttgagaatgcatgtgccagccccttagtccctgggagtcaggttatgtgtctacaatgaatttgttcatcctccgtaaagcagggtttctcaacctttgtaccattgacatttgggacagacaattctctgttgtaggtgccgtcctgtgcgatggagggttttcggcagcatccctggcctctaggtgccggtagcacttctatcccccattctcctatgtaacaaccaaaaatgtctccagaccctgccaaatgtccctcaacagggcagaatggccccagctgacaactgcttctctacaggttaggaatatagcagtgaataagacaggcaaagtttccacctaaagttttgctactcaacagttgcttggtcttaatacctcttaacagctcttggttgctttacctctccaagaaaaaaaaaaattaaataatacccaaggtcctctccaactttgtcatcctttgtgatctctttgtgtgtttttaattaaatataattgtttagaatggcttttttcccctaaaggtttgaacccaaatcacatatacaatggattttaaaaataaacataaaaagcatgtgataaataaatcttttttaaaacaaatatattcttccaaaaatcagtgtgtaaatgatcttatccagagaaagttacacaaataccgtctccttgtagctttcagttctgagcagcccaagaccttgtagcaagcagagcagagaaacatacagaattggacatacaatcgatttcatgcttgatggtacaaagccattgaagagtgtaataaaatcacattgagcatggagatttcattgactttttttttttaaaagaaaggcttctttttttttttttttttcgaattaaacttatgttttgcaattcaaaacccagggccaaatcaagtgattggagtggtaataaaatgataacttatgttagcatccacctaacataaaaatcacttgatctgcaccaaaaaaaaaaaatcttgtggtgtttatagtgaaaaaggcattggtccaagttaggaagtgatgtagagaagtgaggctagaagagttaaatgttgggcaggaggctgaggcaggagaatcacttgagaccagaagttagagaccagcttgggcaacatattgagaccctatctctaaactaaaaaggaaaagttaaatgatgagaatagaatctttccataggcccttttggcaagtgataacagagccctttgaatgtcattaaaaatgtcctagacattttagctactgtcaagtcctgtttgcccagggtcacggaaatattatattcctgaagctaggaataaactcagaatatctctgggtgaaaaagggattgagatcagtttttgatctaggaaattgtgtgatatcttgatgaacagaggtgagagttatatggattcctttatctgtgaccatgaacagagaattctatctaagtggggaaaatgaattaatgtgagggcccaaaactaggtctaggattcatttaccctttgaagtgctaatgtgccacacttgcttgatgtttttaatggcaaaaccattatctaagagtatcagtcccagcactttggaaggccaaggcaggcggatcacgaggtcaggagtttgagaccagcgtgaccaacatggtgaaactctgtctctactaaaagtacaaaaattagccagacacggtgacatgtgcctgtaatcccagctactcgggaggctgaggcaggagaatcactcgaacctggaggcaaaggttgcagtgagccgagagcacgccactgcactccagcctgggcgacagagtgagactctgtctcaaaaaaaaaagaaaaaaaagagtattggtgacccatgtgctttggaaattctgtttatttgtttgtttgtttgtttgtttgtttgttttgagacagagtcttgctctgtcgcccaggctggagtgcaatggcgtaatcttggctcactgctccctctgcctcctaggttcaagcaattctcctgcctcagcctcctgagtagctgggattacaggcacgcaacaccatgcctggctaatttttgtatttttagtagagactgggtttcaccatgttggtcaggctggtctcgaactcctgacctcatgatccgcctacctcggcctcccaaagtgctgggattacaggtgtgagccaccatgcctggccagaaattgttaaacaacagaggaagtacaatgaagatcaaaatgaccctcaaattttttaaactagagacctttatgccttggatcactttagaacaaactaaagaatttctcatgaaaacaccattgctttctttctttgtgtagatagagaaaggaagtgggtttctcttttcctccttgcctggccaaatagaataagccaattctgatggccaaatcattttgaaagaggaggattttaagttcttagagcttacaacttcacttcccatcttgaggctggttcagcatctaggaagcttgtaaatatagtctgctgacttgtctgtaagcaaagctctttagtgctggatctcactgaaagaatggagggagcccctcaaagtcatattcccatagccactggactttatcttcctatccaaggggacctaggaatagaagtctcatgttggcaaattcaaatattccacgtgggctaattaagtgcctgctgtggtcaacaactgaagaatgttaccagaaagcctaaatggttattatcctattttgaagccttctcactccctggccaaaagttaaaataactggctaaagaaccaggaacttctcctaaagaggcatccaaagggaaagtcaaatagctcataaaatcctactccagtctgtaaaacagcgaaagagacacttagcattgggtgttgtttccttggttctctttattttatgaggtctcaataagtttcctggggctgctgtaaaaaagatttctttatagtggtttgtaggctacattcccccacccaccctcacacacacaccctcattcccgcctcctctccacacctcctctccacacctcctctccctttgtttgatttataaaactttttccatgtcctgtgtcctttttccatgctctgtcaactgacccttttgctcaaaaggcttctttcctctccagggcagtgttcactgctgattgggcctgtcacagtccaaattacaggctcactgaggctctctgtttagacttttattaacaaatgcaatatgccagtaattcctcagaattatctgaagtggacgctgtggctctctgtttagatttttattaacaaatgaaatatgccagtaattcctcagaattatctgaagtggacgctgtggctctctgtttagatttttattaacaaatgaaatatgccagtaattcctcagaattatctgaagtggacgctgtgatgtgccgttcagacctcccttcaggaatggaaacttgatttcttcagttgcagtttgtgctgggatggacctcagctgtcagccttcttccagaagtgcccccactggagaaagctgcctcactgaaggttgtgccttctcccaaagcagctcataccggcaactcatcaacatgaagttcaaaggcccaacctcctccccactagccctggacaattcagatggcaattctagctccagagcttcctgcggttacttctgcattgcagcccagcatttccttctgcccagtcgtcctcacttccccttttggtcacaagatgctgatcccaggagctctctgtcatgcctgtcctgcactctgatctctgtcttggagtctgcttcccaaggaactcagccagtgacaactggtgccaagaatgggctgagatagcagacactaagatgagactttggaacttgatcccctttcacccaactggcagtgaggaccccttcactggtgacaggtgaagcacaggtagccctggcacatggagcagagcgatttttgaactttcaccactggtggactggggtggtgtagcggtggaagggactatgccagccaatgcaatgtatgaggcctttaaaaagggacaaccataggacagtagaattgggtggccattgctctacttgactgacactccagaaaacaacaacaacaacaacaaaaactgagtgtgatgaatcagcaattcaaagctaagtgggaaaaccagaggacttccttggtcacatcaaaagatgctctcattctctctagaagaaggtaaagaaagcagaacaccaggccaaagacggttaattcccaaccaagtcagagtggctatgccaaggccatggccccagcccctgttggaaagaatggggcctcaactcataagatgaggacatctgggttgatgatactcacaaatcttggatgcccaggttcccctgaaccctttgaacttgaagaagttgttcactcttcccaatgggctaatgccttcccttgcttaaatgcaattcccaggcctttttcctgcaagacagcatgtgtaatattcaggatctgttcccccctcctgtcctggttagtgggttaataactagggtagagtcacagcacaacccagccagagatgtactgaacctgctgagggaggaaaaggactatacgctaaaggcattctaggacctcatcaatatctccaggcaagagttaaaagaggacttctgggacaggaagatgagtgctagaataagggagcagaacataaatttagataaaagagagttgtggcgttttgtttttatatagagatggtgatatggtttcgctgtgtgcccacccaaatctcatctggaattcccacatgttgtgggagggacccggtgggaggtaattgaatcatgggggctggtctttcccatgctgatctcataatagtaaataagtctcacaagatctgatggttatacaaggagcagtttccctgcacaagctctctctctttgccttttgccatctgtgtaagatatgacttgttctttcccttctgccatgattgtggggcttcccaagccacatggaactgtaagtccaattaaacttctttattttgtacatttcacagtctcaggtatgtctttatcagcagcatgaaaattgactaatacagtaaattggtaccagtacagtggggtgttgttgaaaagatacccaaaaatgtggaggcgactttggaactgggtaacaggcagaggttggaacagtttggagggctcaaagacaggaaaatttgggaaagtttgaaatctcctagagatttgctcaatgactttgacaaaaatgctgatagtgatatgaacagtaagttccaggctgaggtggtctcagatggagatgaggaacttgttgggaactggagcaaagatgactcttattatgctttagcaaggagactggtggcattttgtccctgccttagagatttgtggaactttgaacttgagagagatgatttagggtatctggcagaaaaaaatttctaagcagcaaagcattcaagaggtgacttgggtgctggtaaaagaattaagttttataagggaagcaaatcataaaagtttggaaaatttgcaccctgacaatgctatagaaaataaaatcccattttctgaggagaaattcaaaccagctgcaggaatttgcataagtaacgaggagccaaatgttcatccccaacacaatggggaaaatgtctccagggatatcagaggtcttcacagcagcccctcccatcacaggcctggaggcctaggaggaaaaagtcgtttcgttggccaggcccagggtccccaggctgtgtgcagtctaaggacttggtgtcctgcatcccagccactccagccatggctgaaaggggccaacatagaacttgggccatggcttcagagggtacaagcctcaagccttggcagcttccatgtggtgcttagcctgtgagtgtgcagaagtcaagaactgaggtttggggacttccacctagatttcagaagatgtacagaaacgcctggatgtccaggcagaagtttgctgcaggggcagggctctcatgaagaacctctgctagggaagtgtgaaagggaaatgtggggtagaagtccccagagtccctactggggcaccgcctagtggagctgtgagaagacagccaccatcctccagaccccagaatggtacatctactgacagcttgcaccatgcacctggaaaagctgtagacactcaacgccagcccgtgaaagcagccgggagggggactgtaccctgcaaagccacaggggcaaagctgcccaagaccatgggaacccacttcttgcatcagtgtgacctggatatgagacatggagtcaaaggagatcattttggagctttaagatttgactgccacgttggatttcagacttgcatggggcctgtagcccctttgttttggccaatatctcctatttggaatggctgtatttttacccaatgcctgcaactctatggtatctatgaaataactaatttgcttttgattttaccagctcataggcagaagggacttcctttgtcttggaagagactttggactatggacttttgagttaatgctgaaacaagttatgactttgggggactgttgggaagacatgattggttttgaaatgtgaggacatgagatttgggagggaccagggtggaatgatatggtttggctatgtccccacccaaatctcatattgaattctcatgtgttgtgggagagacccagcaggaggtaattgaatcatgggggcaagtctttcccatattgatcttgtgacagtgaataagtctcatgagatctgatggttttatagtgtgtgggggggggtggttcctgcacaagctctctctctttgcctgctgccatcgatataagatgtgacttgctcttccttgccttctgccatgattgtggggcttccccagccatgtggaactgtaagtcaaattaaaccattttcttttgtaaattgcctagtcttgggtacatctttattagtagtgtgaaaacaaactaataaagatggggtcttgctatgttgcccaggctggtcttgacttcctgggctcaagcaatcctcctgccttactggtatgggtgtactctttcagaaaataggatttaactccatgcaaggacccctgggagatggcatgaatgcattgttagtatggctcccaggtgcatgggaaagtgatggccccccactgagtgaggtagaagtgccagaattgccatggcaggcattggaagaagagataaacagccagagaagggggcaccttaaagtggctgaaagtccaaccagggaacaatgttcatgaaacaactcagaagaataaccgttttcaaagcaatgaggaatgctttgctgagatggacaccagcctctctaagaagttcagtggtgactcttccctgtgggacagggacgatgggagcagatgctgattcaaaactgggcatactaatagcaataggaagataagactacaaaacaatagaggccaagtgataatgcgtagctgccagaagtcaggtggatacaattaacatcatcagcagcaaagtgagagggcagccaaggtgccctagcttatagagactgcaagaaactgatggacgtggaaaaagaaaggagaggccaacaagagcatactcaacatttataataaaaacaaatcaaacatggctgatgagatgaggccagttgccccataaaaagtcaaaatcccttgcctacttttctaatctgagccggtttggggctgtggaacctatagattgaggaagaagtgggatccccaggaggaaagatgctgcaacaccactacaagtgtatgcagtaatgattcccccagttcttcctcagaggagcctattgccatttactcaggcactgtacacaggagaaaagggaatccccacacattttgaggattgttggacatagagtctgagctgatacagataatccacacatctgaaacagactcatggcctccactgtcagaataagagcaaaaggggaccaggaaatcagtatggtcctggctcaagttcaggtaacaaagggttcactgatgtcttcagcatctctggttggttaatatgatttggatatgtgtccccacccagatctcctgttgaaatgtaatctccaatgttggaggtaggacctggtgggaggtgttttggtcatggggtggatccctcatggcttggtgctgtcctcttgatagtgaattctcacaagatctgattgtttaaaagtgtgtgccacctcctccctctcttggtcttgctcctgctcttgccatgtaacacacctgcttcctctttgccttccactataaggtttctgaggccctcacgagaaaccaagcagatgttggtgccatgcttgtatagcctgcagaaccgtaaaccagttaaatcgcttttctttataaattcacagtctcaagcattcctttacaacaatgcaagaatggcctaactctgcggtcatttctccagtccctgaatgtatgaatggaatagatacactgggtatttggcccaaattctcatagtgggttctttacttatgagacaagagccatcgaagtagcgaaggtagaagcctctgaaaccgccctcctggacaagataataaatcaaaacgaatatattattttaacgaattcagcagaaattagtgcaactttaaagacttaaagaattaaatcaggggtcagcaaactatagaccaccctggcatgctatgtgtgagctttgcacttttgaatggttgcattttaagtgatgatgtaagtacctacgtaataacttctgttttgatgcttggctcacaaaagctaaaatatttactagctggcacattacaagaaatgtttgccaagctctacattaaagaggggtccccatcttttctctatttatttaccagtctgcattttgcacaaaacagacagatcctggaggttaacagtgaactacaacaaactcgaccagtagtagcccaatttgcagctactttgccaaatgtggtagctttgctagagcagattaacatgggtcctggagatggtatgtggtcattgtcctgaggaacgtgttctgctcctcttttattagaaaagaaggttagaaacagtttgcttggctgggcatgatggctcatgcctgtaatcccagcaccttgggaggtcgaggcaggcagatcacaaggtcaggagatccagaccatcctggctaacacagtgaaaccccatctctattaaaaatacaaaaacttagccgggcatggtggtgggcgcctgtaatcccagctactctggaggctgaggtaggagaatggcatgaacccgggagacggagcttgcagtgagcagagatcatgccaccgcactccagcctgggtgacagagcgagactccatctcaaaacaaaaaaaaaaagaaaagaaaaagaaacagcttgcttgtcttcaagggataacataataaattcacagttttgctcaaaggctatgttaactccctcaccctctgtcataacagtctgaggagatctgggccatttagacagttcatagaattacacactggtccatggtattgatgacattgtgctaatcagaccagatgatcaagaaataaccagcacactggaggccatggtaagatccacatgctctcaggataagcgggaaatcctacagagatacagggacctgccacgtcagtaaagcttttagggtcccagcagggaggcattttagcacagaggtcaagacaacagtcttggctgttctctgcgaaacaaagagtagatgctcagaaattgagagttaacatgattatggtactgatgataattataacttttgatgtttggaaggcctagccctgcatctgctgttaaccttcccatatctttaagttattaactttgttacgccatgtggcaatgtgatgccttggatctagaatcctggagcttgatcaaatgttggctctgccctcttagggattgtgaaactctgagcatgttacttcacatctctctgaaatatgtacattctcccctgttaatgatcactttggattagataatatctaacatatcttccatcttgaatgctccattgtggtagctgctactacatgcttctatttaaacttacacttaaatgaatttaaattaaattaaaattcagttcctaggccacaccagccacatttcaagtgttcaacagtcactcaaaataaaaatatttaaacaatagtttaaatatttttgagatgaaatggtactgtgcattttgagggacaataatgtcatggctagtgtctaccacattggacagcagagataaagaatattaccatcaccaaaaaagtttctttgtacattgttgctctaaaatgctatcataatatattccaatctttttaagttcaatgaacatgcacacacatatgtaaataaaatataccctagagctaacagagtactaaatcagtcataccataagggctcagtacaaggacattaatacatattacatcaaagttataattataataaccttatgaaattgttgcaatcattccatttataaataagaaatcttagttttcaaagttacccctctgctcactgagctaaatgcatatctgattgcctcctttggagagcctaatcagaaactcaaaagaataccaccatttgtctcttatctacctaatggcctggaagccccctccccgcttcgagtcttcccacctttgctttgagttgtcctccctttccaaacggaaccaatgttcatcttgcatatattgattgatgtctcatatctccctagaatgtataaaagcaaactgtgctctgaccacattgggcacttgtcagcaggacctctgaaagctgtgtcacaggcgcacatcctcaaccttggcaaaataaactttctaaattaactgaaacaacaaaaaaagaaatcttcattgtttcaagtgacacctgcagcctcttacagctcacttgcagccttaacctcctgggctccagtgattctcccacctcagcctcccaagtagctgggactacaggtgtgtgccaccacacaccacaactggctaatttcctttctttctttctttctttctttcttttcttttctttttttttttttatgtagagacaaggtcttgctatgttgcccatgttggtcttgacttcctgtgttcaagcaacccaacccacccttgccccagtcatacatctaagaagtggtgaagtaaagatccaaactcttttttaagtcctcatccttgggtactgtttcctactgtcctctaacgtgcttagatgctgattgcaagtacaatgcaatgatcttctaaattccaacatgagagattctcaggggctggaacttaagcagccaggaactggctttcaggcccttggaggcaaagtattgccttgttttcctcttggctctcagggcagcttttcagaaacaaagggaacactgcttggaaacgcttcattctttctggctttccagtcagttacttcttgcctcaagctgacattgtgaccactttgtgcgtgtctccccccgtcttcatgcatatccccctttgttaacacacacattcatacacatgcacacacatatattttttcttatactgtagcctgaaaatggcatagatgtctggatgctgtgttgttccattaatttaataataattccaaaaatattttgctttcatcctatatgcctctttcaaagtttgcataagtgcacgtgtttgtgtggaaaaaaaaggactgcctcatttttagggttagaggttcagaagaattcctcgacacaggcaagttgagaactgaattttgttttggaaggaaaagggggaatcccatgtgtgagttgtgaaatctaactgactgaagttcaactggatttaaatatttttgagatgaaatggtattgtgcattttgagagacaataatgttgcttaaaaataatctggcttggaattagaagacctcagttttggtactaactctgccattcatagatgtaggacttcaggcagacagttaactactgagtctcattctcctcatctaaaatggtaattgtgataatactggttttagtggatgctctagtgtatggctacatccatactggatgtagtgaatgctgtaatatatggctcagactcccattcaagaccaagataattattttctaggtggaggaaatgattatttttaatttttttaattaaaaaaagttttacagacagggccttattctaccacccaggctgaagtacagtggtgctatcatagctcagtgtagccttgaactcttgggatcaagtgatcctcctgccttagcctcccaactagtttgtcttacaggcataagccatcacacttagcaaggaaatattgcctgctgacagctcataggcaagtctgtccccaggaattgccctcagcctaaagcaatcaccttgcccaagcttatacacccttaccaagaatagcccacatacaaagactgatgtgtgtaacatacagagatccagtctttttacctgaatttgggatctctgaagtgctatcccagctctagatccccaggggatcagctgataactacatttcaatccagttcctccctttgcccaattctgcttttctcactccttcacagatggtagcctcatgagccttctccaagaaatcacatgtaagcaaatctccatcttagagtcacctggaaatcacctagatccatgctacaagtcaaagttttgttttctcatgctcataacacaaacatcaagagaaatgtactattaaaaatatgttttctttttatactgaagcgtttttttttttctgaaatattcaaatcaggagaaaactttgaaagatttaactctttatgtaccaataaaataactgtattctggatgcgacaattgaaatatttagtgacttagccattttaatagcatctaaggtgagagttagcataacataacctgttttagagttttaaaataaaatcatcagaaaaagtttttttgcatgttacccaagatactcatgctataacacttactactcacagtctccatttcaagatatctttcccagcaatcacagtcaaaatgaatcattctttccttactgcccctgtaaaagacaagcatagttattttcatatatgtttttctcccccatgggattgtgatatttccgtaaggcagaaactatgtattattcacattttatcccccagaattaagtacattactttcatttaggaggctgcctacaaatgttagctgaatgtcagtttgggtaattataactgttatagtttacatatatttagagggccaattttccccaattttctctgaagactacaagaagagaaaatgtcttaaactgagggctgagagattcaagaatgaggtaaacaaatatttgtataagtatgatataaagaaatatttttataattgtaaggcttattatatgttagaaatggctactaaaacccaaacatttctggccaattgatccctgacaagggtgccaagaccattcaaagcgggaaagaatagtttcttctacaagaagtgctgggacaactggatacccacaggtgaaaaaatcaacttggactcctacctcaaaccatatacaaaacttaactcaaaatgaattaatgacttaaatataaaagctaaaaccataaaactctgagaagaaaacatagagttaaatcttcatcaccttggatttctccatcgattcttatatatgataccaagaacataagcaacaaaagataggacagataaactagacttcatcaaagttcacacttctttttttttgagacagggtcttcctctgtcacccaggctagagtgcagtggttctattgcagctcacttgcagcctcaacctcttgggctcgagtgattctcccatctcagcctcccaagtagctgtgactacaggtgtgtgccaccacacaccacacctggctaattttttttctttctttctttcttttttgtagagacaaggtctttctatgttgcccatgttggtcttgacacctgtgttcaagccaccctcccacagggatgacaggtgtgagccaccacatctagccaaaattcaaaacttttgtgcatcaagagacattatcatgaaagtggagagcaaatccacagaatgggaaaaatatttacaaatcacatatcttataagaatcaagtatccagaatatattaaaaatacttataactcaacaatgaaaagataaatcaacagaaaatgggcaaaggacttgaatagacattttcccaaagaagatacataaatggccaacaagtacatgaaaatatgcttaacatatttgccattagggcaatgtaaatcaatgccacaatgagatactacttcacacccactaaaatggctgtaataaaaaaagaatctccaccagtgttggtggggatgtggagaaaggagtactcttgtacattgctggtaggaatgtaaaatggttcattttacaaatatacctgtgatggtttgttggttcctaaaatgttagacataaaattagcatatgaccctgagatttcgctcctgtatatgtactccaaagaactgaaaacagaagctcaaacacatatgtgtacacacatgttcatagcagcagtattcacagtagtcaaaatgtggaacagcccaaatgtccatcagtgaataaatgaaaaaactaattgtaataaatgcatatactactcagccataaaaaggaatgaagtactgtaccagaccgttctcacactgctataaagaaatacctgaaactgggtaacttataaagaaaagaggtttaattggcttatggttctgcaggctgtacaggaagcacagctgtggaggcctcaggaaactttcaatcaggcatgttttacatggtcagagccggaggaagagaaagaagggggagttgctaaacacacacacacacacacacacacacacacacacacacacacgcacacacacgcacacaccccagatctcctgagaactcactcattatcaggagaacagcaagggggaaatccacccccataggccaatcatctcccaccaggtccctcctccaacactggggattgtaatttgacatgagatttgggcagggacacaaatccaagccaaatcaagtactgacacatgctacaacatggatgaacctctaaaacacactaaatgaaagaagctagacacaaaagatcatctagtgtatgattctatgctatatatatatatattcaaaacttttgtgcatatatatatgatgttggtgcaaaagtaattgtggtttcttttgcacctacctaatacataaaacatccagaatagataaatgtatagagatagaacacagattgatgatagtcaggggatagaaggagtgcaaaataaagaataattgcttaacgtgttttcctttggggtgatgaaaatattacagaactagaaaaaagtgcacaacaattgtgaatgtaataaatgctacttaatggtcactttaaaatgtttatgttctatgaatttaacctcaataaattacagtattttaaaatgttgtaatgattactaagggaggttttgcaatttcttacgtgttagccgtctaaactttgtaggattgtttggacgctttgttgctctaaagtcaaaggaatggtaatccttcgcccttccaggtcctttcgaagttggcagatagcaaacatcagtattattcaccaatatcttcttctcctctcttttcggacatatgaagaatgacacttccttgtgtccccttgcattaagaagggccatgtaactagttatggccaaggagaagtaagcacaagttatatgtatgatttgaggggtgagagattgtccatgttcttctcctctgccatgaaaaaagggaaaacaataacatgggtggaggtagaggtttcacaacattgaaatcatctagaatgctgagctcccaatggaagagagctgtcctgcagaatagcttggacctgaagtgaactttaaaaatgcaagaaacagacttttactgtgtcacactaccaaaatgttggcaatgcttgctactccacataatagcctatccctaacacaagtggcccacggaaagagaaggtttgtgttttctaagattgttcatgttaagactgtgcctcccctttagtaggctggctaaaaagaaataaaacacactggtacagggttaacaataaatgttagattttagacatgccatttgtaatgcttaagaacaattaacaaacaagaaaacatcataaagaagaagccttgcagagagactttcagaacaatgcataaatatccatgccattcaggagaaaccacatctcctctgtctccttctctgctagctcaccagtgtggttggagtacagggttcataggctgttcctcctcagggcctctctctcagaaatcatctggtagcacaaaaccaggaagaaatatctaggccaggtgagtgtcacctctttttaaatatagcccttggtttattcatctctttgagagtacttcaaagtcacatcaatgagattatgagatattcatcttgaaaggatacagaaatttccttggcctcaggtagactgatttctggttgtcattctacaaagaggtagggagaagacaagaacaaaatcaggctgcacgtctgtctcatttttagaaaggaagaaagtgaactgaatgctaaaaatgcaaacagtgccaggcgcggtggctcacgcctgtaatcccagcactttgggaggctgaggcgggtggatcacgaggtcaggagatcaagaccatcatggttaacatggtgaaaccccatctttactaaaaaaatacaaaaaaaaaatcagccgggcgtggtggcgggtgcctgcagtcccagctacacaggagcctgacgcaggagaatggcgtgaacccaggaggcggagcttgcagtgagccgagatcccgccaccgcactccagcctgggtgacagagcgagactgtctcaaaaaaaataataataataaaataaaaaaatgcaaacggtatctgatatactagatgtcagttaagggaatctggaacagaaatttgagggcgactcgtttcatccagcagataatctcaaggcttaagtgaagccctttatgtctaaagaaattgctactgaaccatgttaattcatctggaaaatccaagagagaaagtttactgaattatcttagaatttaagctgtggagtcagatgatctgggttcaaagactagctcatatatggactacatgtgtaatctcaggaaacttaattcgtcagttgatacttctgttttatcatttatgaaatggagtaattatgcttaagagtatttttttttttttttttttttttttttttttgacagagtctcgctctgtcgcccaggctggagtgcagtggcgtgatctcggctcactgcaagctccgcctcccaggttcaggccattctcctgcctcagcctcccgagtagctgggactacaggtgcccacctccacgcccggctaattttttgtatttttagtagagacggggttttaccgtgttagccaggatggtctcgatcgcctgacctcgtgatctgcccgcctcggcctcccaaagtgctggggttacaggtgtgagccaccacgccctgccgcttacgagggtttttgtgaggataaaatgagtttatgtgtcaagtgtttacaacagttcctggcacacagaatgtcctacatgagagtttgctattataaggagttaatcaaacacctgaaggctttggtggtgaggactggcttcgaagtcatatctgagtttgagtcctgcagctgtgtgactttagctggccaaactctctgagttttcattcttcccctatcacgtgcacaatatttttgggagggattgagcaaagaaaggattcaaatagtttagcacagcaggtgataatgagtgagttctcatgagatctgatggtttaaaagggtgtggcaggctgggtgcggtggctcacgcctgtaatcccagcactttgggaggccgaggcgggcagatcgcgaggtcaggaattcaagaccagcctggccaacatggtgaaaccccgtctctactaaaaataaaaactaaaaaaattagctgggcctggtggcacgtgcctgtaatcccagctactcagaaggctaagggaggagaactgcttgaatcaggacccgggaggcagaggttgcagggagccaagatcgtgccactgtactccagcctgggctacagagtgagactctctctaaaaaaaaaaaaaaagaagaagtgtgtggcagttccccccacccccagcttctctcctgccaccatgtaagttgtgccttgcttccctttcaccttccgccatgattgtaaatttcctgaggcctcccaagccatgcagaactatgactcaattagacctcctttctttataaattacccagtctcggatagttctttatagcagtgcaaaaatggactaatacagtatactagttcaaaaatagagtaaaaatttcttcccatgagctctatcaaaaatctcagaattcactctcattagactaacatgatgacatgctcacctttgaactaatcagtgtgacctacagaaatgtacatgttaattagtctgagctagacagagtggtgtttttctgctccaatcccaacactgagtctgggaattcaaaagtagttttccaagagaaaatggaagtactatgttgctatttgaagcagagagaatggaaactgagcaggcaaatagaccatctttctactaaaaaaaaggtatgaatggaggaaagagaaaaataaaaggagatacctggcaaaagactcagaaaagctggggcattagaagttgcaaacagattttcacatcctaaaatccatggtaggattttaacttggagttatgtgttcagtggtaggtaatggattttctactgttgtattcagacaggttcccttgcctggttcctaccgaagagcagccaacaggagttagctggggagttttttggtcacagggaacagcagtgtctactgtattttatgggaattaaacctgtaatctaattgtgaataatcagagactgaaacttgggatagctgtttgctacagaaccaaaataaaagcaaatttatcaggatgtgttagcctacaagtaaaagaaaatccacattcaaatggctgaaataaaaaggaaatttatttagctaggaatgcaaagacagggcaggttccgaaaaatatgtaaaaactgatttgttaaaactttattttctggccagctgtggtggctcatgcctgtaatctcagcactttgggaggctgaggcaagaggattgcttgaggccaggagttcaaaaccagcctggccaacatagtgagacgtcatgtatacaaaaatagaacaacttagcaaggcctggtggtatgcacctatagtcccaactacttgggaggctgaggggagaagactgcttgagcccaggagtttaagactgcagtgagttatgatcgtgccactacactccagcctgggcaacagagcaagacccccattcaaaaaaccccacaaatctttatttgtgtttccaccctcaatatctcctatagcttaagactgatggtcaccagatggctgcaagtagcttcatgctcccttgctcaggcctagcataagaaagaaaaatctctttccaaagcacgaaacataagttttccttttttggtctgcaagaattaaggaaggtcatgcaatattagggacatactttcactacaaataacattggttatcggaaattcaaatataactgggcatcctgtattttatctgccaactccagacctgattgatttagatttacccaaaatgccctctagagggaggtagggaagacacagggacaaaatcaggctttcaatgtctgtctcatttttagaaaggaagacagtaaaccgaatgctaaaaatgcatacagtgtctgccacactatatgtcagttaagggaatttggaacagaaacttgaggattagtggttttatccaacagatcatctcaaggcttataccctggatttgtaaagtattataactcagtataattgtacaagtatgtatttaatactttttaatcagtgagacactcttgaagattccaggggaccactgagcctctgcctccaacgtgcttccagtataatagagggaattaaataagcacaggaggtgaggagcaccctgaaaaagatacagagagccatgaggctccagaactaggcttccctagcagagccaacctcgaaaacatgcctcaaaggatattgaataagaagggacataatagagaactgggacataaagaccagaaaaatattttagggctaatttttacagagaaatttcaattcaaattggaaatgtctacaaattatccaatagtgaatgtggcaaggaagattttcgagtggtggtgtggtatgattgaagctgcattttgagaaaaatcaatctgatagcaatgtgtaggatgaattggggtgaggacaagaccatcagtgaaatggtctagaacaatactatcagatctaaaaccctcttttggtacctagattttgtaaaggctagtttactctcttgaaatgaaattcagagaatataaccatcctgtaagcataattctaggaaatttagtaaaaaactctaactgtaatagaaataaaaaataattcctttaataataaaacttacattctactatgagggtcaaactacagacccaatacatctttccacctatttttatattgtctatgataaaaatgcacaatataaaaattggcaatatataatgagaaaatgactgtgtccaaaatggaatgcaaaaccatgtcttcaatctaccatgtcctgaaggtcttgagaacacttacaccctagcagagtgagacaagctcccattctaaacaaatctaaacagacccaacacaactttccacctatttttatattgttcattgtttcatttttaaacactttattagcctgctctcatgctgctaataaagacgtacccaacactgagtaatttataaaggaaagaggtttaatggactcacagttccacatggctggggaggcatcacaatcatggtggaagatgaagagtgaagcaaaggcacatcttacatggtggcaggcaagaaagcatgtgtaagcaaactgccctttataaaaccatcagatctcgtgagacttattcagtatcacaagaacagcatgggaaagacccgcccccatgattcaattacctcccaccaggtccctctcacaacacatggggatcatgggagctgcaattcaagatgagatttgggtggggacacagccaaaccatatcaaatgcttatattttaaataatcacataagttactggcttgcaaagcataaagtatttactatctggccctttacagaaaactattgctaagctctgccaggaataactacagaatgtgcgtgaccgcaaagtaaaattgagggctccttgttcaaaaattattaagaacaatacagcagtcaaccaagagcagaattcacatccatgaagccagccctctctgttctagtatagaaatactcagacacaactccactaccaacaaaatgaactagtccgataagtgtacctgtgaatgcaccagttacaactacagacaaaaacaaataggaccatgcataatgcacaaccctgggtagtagccccaatacaaatgtgatttattggcagctcaagtacgagggtggtgtttccattcctgatgattttttttcattgctaacaactcttggggaattttcaaataatataaagtataatcttgggacaggcgaggtggctcacgcctgtaatcccaacactttgggaggccgagataggcagatcacgaggtcaggagatcgagaccatcctggctaacatggtgaaacctcgtctctactaaaactacaaaaaattagccgggcatggtggtgggtgcctgtagtcccagctactcgggaggctgaggcaggagagcggcgtgaacccgggaggcagagcttgcagtgagccaacatcacgccactgcactccaggctgggtgacagtgcaagactttatctcaaaaaaaaaaaaaaaactatatatatatatatatatatatatatatgtgtgtgtgtgtgtgtgtgtgtgtgtgtaatattcattatatatatgtatatatatactatataaaatatatataatataatctttcctcaatttacatgaaagttgcatttctggaatactcatggaatattaaaacataaagaactgcactacgtgtgaagcagaataagcttgtaagctcagataattattagcaacttttatatgactattcaatgacatctttgaagggttgtgtgggggctcagaacaattgtttgctgtgaagctctggccaatccattgcaaaacggatagcgccactgaccccaatgtgccagacatcagtagtatctccagtgcctctcctattgtgacacccacaaagcccacagtcattttcaaaccacgctgtcaggggtggtactacccaagttgacaattatcagtctagacaatctaataacaattcgatgttgggtggtaatggtgagatattgtataaatgaagtttggggctcttggctattgggttgcaatggtacaagcatgaaaaaaagttaaagatgaaaaacataacatcttgccctgggacagccatttttaaaatatatctagtcaaaattgcacaggttatctcactttctctttgcaacattcttttgagataggtaggacaaacgctaaaaatatcagtactttagatcaggagtccccatctcccaatgtaccagtcagtggcaagcattactgcctaagctctgcctcctgtcagatcagtggcactattagattctcagaggagcacaaatcctactgtgaactgcatatgcaagggatataggttgcatgctcctatgagaatctgatgcctgatgatttgaggtggaacagtttcatcctgaaaccacccccaacttcccactgtccatggaaaaattgtcttccacaaaactggtccctggtgccaaaaaggttgggaactgctgccttagatcaatgtagagttaacttttttcaaattttttttgttttatatttcataatgcaaataggtgttattcaatctattaacatattttaattaaaaatgtatattcatttcaaagttaattgttgacattcattctatgtaagacatgtagtttgggaatatagaaaagaagagtctgaaacctacaaagcaagaggcaatttgaccaaattcccacgacatgtagataggactagaattcagttctcatgatttagttctgtgttcattcaattttcttcgctttgtggggtaaaatgattggcccagcacctgttttgaatagacaagcatttcaacttgcaacttatagataagcaaagagaatacagcatcatcaagaatgatggtccccagttcccttccaagtcttaaaaaaagaagtcacttggcacccttctctaatcgaaagagagagagtagttcacagacagttggtaagaactgccaagtgactccccatgaagagagtattcgtatctgtacttaagtagagcccgtggaaaacacagagaaatgagatgttggagtgttttttaaaattattattgttgaactgggcccagaactccactacagatcatgtatgtctggaattggcaagacccaaaactaatggtgctgtcattttatatatatatatatatgaaatttcttaagtcttgtaccaggaaggaggctcatatagggtaaccactttagcccatccataaataatccatgttaatatcctaagagaggttcagggactggagtaatgtgctgacatctgcctgcttctggcagaatggcttgtatggtctaaacagatggcctttaattggtagtgggttgtcccagcagagggcagcttgagcagaaatggttatttggattacccacctcatgcctggctcctggaactcctggcatattgtcagaagtgccatgtagttactgccaataggtctgatgtcaccagatggcagcctcttggtctaccatcatcactggagggagggttctttgtagatcttagcaaagatgccatggtgtaaatgggcttgggaaatttgggaggtggatgagtgacaagagaatccatgaaataaacttgccttcaaggtagtttcctaatgaaatctttgggttttggaatcccgattgctacttattttttttgaatgtgacacattctaaacgcttccagcagtaggaagagatatgaactagggggtgaagatttagacttctttcctataacatatgagttaaatggaagaggaaaatgcccacaggtcattgtaaaaagccaagctgctgaaggatcacaagttctattgtgcagacataaaacaatcaggtttctgtttcagatataatgagaaaatgacttactgtgtccaaaatggaatcaaacagccagcaaaaccatgtcttcaatccaccaggtcccaaaagtcttgagaacacttatgccctgagcgaagtgaagcaagctccttttctaaacgaatctaaactaaactgtaaaatattcctatagtacctgacccttagctgagtcctttggaaagtagaaacattatgtacattcaaaattaggttagttgtgggtgaggaccagagctgaactctgctatccacagcaaaagcatgggatgatttgtggacatgtgagcatttagccaatttcctgttgggtttttccaatgatggccttggagtttactttttagcatttgatggtagtgagaatcatactcagccaagtcagccatcctcaagcagaatagaaacaaatgagcaacatgataataatcttatgtgtcttcagagcttcaagcagataccttcattcactcatctagtcctgcagtatcttacttaacaactttcacaggccaaggtttactcttgttgcattttcccagacttaagaattggcataatatactcctttatacagaaatcctagaaggtcaagagggatatttatacatgcaatttacaggacactatattgccttggtgagaaaaatctcttctcttcagcatgaagcgttctgtacaaagacctaattatagacgagaggctgccttctgtttcagataaggtgaccttgagggaggctgagggtgcaaggtcagagctgctaatgactgggagctttataaaagccatgaggcccttgggaagtatacagataagaagaatctggtccatagaaaaagaaaaaccttaaagttttccatacacattggtggaatatcttcaaacaaatatactatgacatgggctgaaaatacccaggatgggaaagattgcaatgattcagacgcgaatttcatggatttaagttgaaagttatctcgggtcaaaagttataggccggtcgtggtggctcaagcctgtaatcccaccactttgggaggccgaggtgggcagatcacttgaggtcaggagttcaagaccagcctggccaacacggtgaaaccccatctctaccaaaaatacaaaaattagctggctgtggtggcatgaacctgtaatcccaagctgaggcagaagaatcacttgaacccgggaggcagagaattacgtagatgtattatctgttcattcatttaattgatatttagagcatgctaactgtattttgggcaccgttttaggtgttagaaatcctgcaatgaacaacaaaagacaaaacctctactttcataatcttacattctagtagcggagctagataataaacatattaataagtaagtaccaggagagtgggtagaaggtgactgtgatggtggggatgccattttaaattgtttggaaagcaaagtctctctccaataaattaaatttgagcaaatatcagaatattgcgatagagcaagccatgaggatacataagagtagaatattccatgcagaggaaacaacagatgtaaaggtccagatgcttgatgtggatgaagaaatttcaggaggtcagtggagccccctccagactgaaggtggggaccagaacacacagggtcccacatacatgtttccctttgtgagattcaagtaaaagattttatgttctcatgtgtatatcttgtaaagctctgaagctacaaaaacagctaacatttcttgtgggcttgtgacgtgccaggttctgtgctgagagcttgcctgcagtcacatcatctggtcctcactacaaccttaagaagtaggtacgatgattatccccttttacaagtcaggaaacttaggcttaaaggttaagcaacttgccaaagttgccctgctagtaagtactggagattccaaagtaaataagaataaaccacaaaggggttaaatggttctccctgttacttgaaaccccctcctctgtgacaaaattccagtagacttgagcttggctgtgctcttaaacaaagaagccaggtagggggaaatcaagagataaaccgtttgcaagagccactctctctctctctccagacattcaccaggcttctagacccctcattctgcagaagtttcagctctttgtgggtcgctgggtttatgtttccactgactctgggaaccatgttgagtgctgagaagcccacagtattcttctccccatgtggttagaggtggcagagaggctgggcagcaatgccagggaccacacctctttgtcaggaacatgtaattaaaaaggaaagaaaaaggggaggggggagagcaaagaaatcgccacccagccccatttttcttaaacacatgctcctgcgtgcgcgtgcacacacacacaccaagccaacaaacgtccgtcactggggtccttgggattctgatgaaaacattttccacctggcacagctaggcattaaacactcctgtagcccaacctgagacttggaccgtcagtggagatatttttaaaaccatgacacagaggcgtgtgacacactcggttttctcagtgggtgggtagagtgttgtttcatgttgttcttgtcactcggcccaacattacaagtgtgcactttattactacacagagagtgctgtgcagccggacccgccacagggtgttcccagccaggggaaggcaacctggacaggcacaaaaaaaagacggaggggaaagctgaaggggacagaggctacacttttgggttctctctcaggcattctgctcatggcagcaggatataaagtgtcccagttgccgtcatttaatactccgtatccattggttgctgtccttgggcaaatgctaagatatggagatatttcctggcatccaaccaattccttgactgttgagtatctttctatcactctcttgtccttctcctttttctcttccctaataggagtttgttcttaacctcacacacacacacacacaattatggtggaatgaggaccaagtatcagtgtcaccctacttacatgcaaaggtgtgagtcagaggccctattgcttccttgggacagataggacaatgatgtacagagggagcagaggagagtgggtgcatctgccctgagcacaggaataaaaaggtgaattgcaagtagagaatttaaaagtaattgaggaaacaggcgggcaccatggctcactcctgtaatcctagcactttgggagccaaggcaggcggatcacttgaggtcaggagttcaagaccagactggccaacacagtgaaaccctgtctctacaaaaagtacaaaaattagccgggcatggtagtgcatgcttgtaatctcagctacttgggaggctgaggcaggaagattgcttgaacccgggaggcagaggttgcagtgagccaagattgcaccactgcactccagcctgggtgaccaagtaagactccttctaaaaaaaaaaaagtaattgtgaaaacaattaagagtcaattgttttatattggcaccttgcactggtgagtctaagcaatttcagtgctgaaagattcctctccatctaagagaaccagtcccaccatcactctacacactcctcagtatgagccattgagtaggatgggaatagaagattggctttaaagacaatattttatttccacagaaaatcaaggccctctggatggaatttgccttatttcccactaagtgaactggacacttatttttccatcaatagcaatcttactttatcaagtcacaattgaatcatgggggcagtttcctggtctcacggtagtgaataagtcacatgagatctgatggttttataagggaaaacccctttccattggttctcattccctcctgtctgccaccatgtgagacacggctttcatcttctgccatgattgtgaggcctccccagccatgtggaaccatgagtccattagacctctttttctttataaattacctactcttgggtatatcaggagtgtgaaaacgaactaatacagcctgcaaaggctgaaatatttacaatctaaaccatgattttaaaaactttgctcacccctactctaaaatatatcgcaataagctcctagctggacacattggttccttttcttggtctcttaaaatccattctccaccaggcagctagcattacctgtaaaacataacccatgtcatgagactctcctgctcaaaactgtccactagtttccataacaattagaataaaagggctgggcgtggtgactcacgcctgtaatcccagcacttagggaggctgaggtgggtggatcatgaggtcaagagatcgagaccatccaggtcaacacagtgaaaccccatctccactaaaaatacaaacaattagctaggcatggtggtgttcacctgtagtcccagctactcgggaggctggggcaggagaattgcttgaactgggaggtggaggttgcagtgagccgagatcacaccactgcactccagcctggtgacagagcaagactccgcctaaaaaaaaaaaaaaaaaaaaaaaaaaattagaataaaacacaaacatcaggcttttgcaggccaagatctttcataagatctggcctctgtctacctttgtaactccttgttatgaacctaagtgtgtgtccccccaaaattcatacatagaagccctaacacccagtgtgactacatgtggagacagggtctttaggagataataaaagttaaaaaacccataagaatggactctaatccaataggactgggggccttaaaagagaaggagagagagatctctgtcttttcttgcacacaccagaaaaggccatgtgagacacagcaagaagatggccataggcaagcctggaaaagagccctcactagcaaccaaattggccagattcgattgatcttagacttcccagactccacaactatgaggaaacaaacgtctgttgtttaagccacctactctatggtattttgttatggcagccggagctaatgcacacctcaatcggcttcgggcactctagctttgctttcttcagacatgatgtatttttgactgcctcaagaactgcacagtgtggttctctctgctggaatgcccttcccctaggtcctgctaaagcatgtgctttcctacagttcaggaagttctttgctttaatgtcactttctcaaagagtctatccttcaccatgattaacaaataatacttccatttttcactcccttctgatattctatccccacaccctgcttcatagcgttgatcacttccttcccttaacatgcattgtagacatacttaatagacttgtctgtacaataggaagaaaagagagaagccaaggatgtctcttctacttgatacctgaacagctcccaggagaatggtgacaccctttactgagacaaggaaacctgtgggaggagagtattttaggagaagagtgaagggaaaaatcaagatttccattttggacatgttatatttaacatatctgttagatgtcatggtggagttgcctggcaggcatttggatatatgagtctggaattcaggggagagattggttctgaagataaaaaatgtgtgagtcatcaatatatagatgggtatgtaaagtcatgatcctgctgatgaattctgctagggagtataaatattggggagaagagggccaagagctaagccctggtgtgagcaactactagaggatggggaaaaaagaggggaaacaaaacataagaaattgagaaagagaatctatcaaggcaatgggaaaaccagaagagggtagcatccaagaagccaagtgaagaaagattgccattcccagcgctgctgcaagctccagataaggactcagacttggtccttaaatctggccaagggcagagacaagacaaaaacaatggtaacaaaagccttttgggacagagtcaagaagagctcataaggtgaaggtgaagagggggaggcagaagttatagatgatttcaaggagttttgttatagggcaaaaagagaatgaagtggtagtgggaagaagctatgaggaaagggggagattatctagaatgggagagatcccagtgtgtttgcaggctgatgagaatgagacatgagagggaaaagatggtacaggggagagaagagatcatggctggagcaaagtcctctagcaggcaattcagggtggatctggcccaccagcaagggagtaggcctctaatgggagcaggtgcagtctgcaggaaaagcagaatatgtgggtacccaaggaggtagagggtgactcatttgtaggtggatgagcatgttctcttctgcctgcttctgttttctcagtgaattgaaggtgaggtcatcaactgagagtaaggaagtgaatgtcaggagggcctgtgacacagtagccctggagaacaggattgtgaatcaaccaggcaaatgcagtaggactgccaggcagtgtgggggccctagtgaggtttgtggtaaaaaatcaacatgtgaccagacagcccccactttctgtttttctccagccggatccaagtactttgcaggagcagaggaggtgaaaagtcaggctgatgtatggtagattttcaactctgtaggcggggggaagagatggaagctgagagtttatgcaaggcagggattataacaaaagaaagacggcaatgaggacatgaaggagttgagggaacagtgccaaagggaagggacaatgacttaaaggtcttggcagggtcaatgaatcactgaggtcagcatcgtagagagaatcctctggaagatagttggttgttgttggagatggagatccttaagaatgagatttgggagaaagaacagtcactgaatggttgggtaggaccttagaaggagtggctatggaagcacagaagacaaggtccttggaagagaacagataagggactgagaggcctgaagagtgaaagacctatgtgattattgaaacaactgtggatgatgacaggtggggtgcttatggtgaaagtgagccaggtacaaagtcttttgtaggtaagaggaaggtccgggttaactcaccaaagcagggggtattacggcatagagtctaatactgtgagcttcaaaggagctgaggttgggtatggggtagaagatggagaaatggtctggaggatgggatgtgaagcaagcatgacacatcatcaccttctaggccctgtgtccataaaggaaaaagaaaagtcatagcttcagaaggctggaagggaagccaagacctccagggatgactggttttagttgcagcaggcatttgaagagaacattcttagcaacaggtgaggatatgggtcattttgatgatgagcaactctgagctatagggcacagtgaaaggattctgagggagcagaggatggggaggggggtgatatggtttggctctgcgtccccacccaaatctcttcttgaattgtactcccataattccccatgtgttgtgggaggggcccgatgggatataattgaatcatgggggcagtttcccccatactgttctcgtggtagtgaataagtctcacaagatctgatggttttatcaggggtttccgcatttgcatcttcctcattctccctctgcctgctaccatccatgtaagatgggacttgctcctccttgccttccgccatgattgtgaggcttccccagacacatgggactgtaaatccaattaagcctctttcttttgtaaattgcccagtctcgggtatgtctttatcagcagtgtgaaaaccgactaatacaggaggattactagattaggggatagacagagctagaagatgataaaggtctctatttcctagggctgttctaacagagtaccaaaatctctgtggcttaggacaacagatatttaatgtcttgcagctctggaggccaaaattctgcaatccaggtgtcagcagcactgtactccctcaaaaacctatgggggtccggggcagtggctcatgcctgtaatcccagcacttcgggaggctgaggagggcagatcacctgaggtcaggagtttgagaccagactggccaacatggtgaaaacccatctctactacaaatacaaaaattagttgggtgtagtggtacacatctgtaatcccagctacttgggaggctgaggcataagaatcacttgaacctgggagacagaggttgcagtgagccaagatcgtgccactgcaccccagcctgggtggaaaatgagactgtttcaaaaaaaataaatacataaaacctataggggaaacttccttgcctcttccagcttctgatgaccctggatgttccttgggttgtggcagcattaccccagttttcatagggtgttttacctgtgtcttttcacacagttctccttggacatgtctgtgtctaaactttttataaggacactggtcatattagactaggctcaccctcatgacctcatcttaacttggttaaatttgtgtcttagtccatgcaaactgctagaataaaaatactataaacagaatggcatataaaccacagaagcttatttcttacagttctagtggacgtgaagtttaagatcaaggctcaggcaggtttggtgcctggtgagggccctcttcctcatagaggacaccttctaattgtattcccacatggtggaaagggaaagtgagttccactgggttccttttatacgagctcaaatttcattcataagggctccaccttcctaacctagacacctcctaaaagactatctcctaatatgatcacattggctatcgggtctcaacgtatgaattttcgaggaacacagacattcagaccacagccatctatagagactctatttccaaataaggttacattctgaggtgttaggggtcaggactttaacatatatcttgtgggggacacaattaagcccataacaaggtctgagtgaccagagacatttctgtaggcttagactttagagggtcaactgcaatgtaatacataacgggatgcgtctcgatggttttttgggtaggcaacaccctttttctcaggatgctttctgcaagagcttgtagggtatgatgaatggtattataaaaggggatcagtgggctcagaaaggatacattaattccaggatgaacagacgtctgcaggccttatttgcagaaagtgtgtggtggtagggcagaggaacttacactgttcttctccccgttccctctactcactatactgcagctccacttgtctatctctgcctcagaaaactacagattgggcagccctaatctttccaaaatccaaaacgcgtcaacatccaaaactttttgagcactgacatgaggccacgagtggaaacttccacacctaagtacttaatgcaaaatttgttttatgcacaacattttaaaatattttacaaaattaccttcaggctaggtgtatataaaacataaatatattttgtgtataggtttggttctcatttccaagatctcattatatgtatgcaaatagcccaaaaatctgaaaacaatctgagatccaaaacacttctggtcccaagcaattcagataagggatgctcgatctgtacctaggctgtcccagcctcaaggcctgtgcacttgtcatccctttgcctggaatattctgtctcggagcttctcatggctggctctctctcatcacagagagctcatcttggaggccacctgcttagaaaagccttccctggccatcacgcctaatgtactgccacctccttcactgttttcatcattttccaaaaaggtattattttcacacttgttcatctgcttaatgttagtttctccaattataaggtccacaaaaactattgtctcctaccccctttgttcagcactgactcccaatgcaccgactaatgcctggtgtgcacaggtgctaaatagcaacaaaaggagcaataggaataatcatctttgattggatgaataaatgtaagcacatacaatgcataagtcatttaacctccctcgacctcattcataaataagactttgacccaggtcttatctttaagatcctttccaatcttataatgccagttatataacagcccgatagaatctgagagacccacaggaatgttgctgctcaacatgcacattcatatctcaagccaagagaagaaaggtcccgtgtattagaccttttaaaaaaagtctatcaggtcaagataactgatctaatttgagcaaagaatggtttaacttacacacatttccttgcacttcacattaatcctttaagctgcagctagaccacacgcttcaaaggtaaagccagggaacacgatgatcccataggtgcagcattgttgacccagccaccattttggactgctgggtgagttccatttggctttgacttttcttatgtgtttagagtgtacatggagcttcctaaaccgtagaagtcatctcattgatccaagaatcactaagacctttatcaataatcttagtccaatcttttgttaaggcattgaaactgattgaggtcagccattcacttctttctgcagccatgattaatctagtgcccactacggcccaggtcttgagctgaggaggtgagaattccactcttcttctcaagctccaacatgtttaatactccctcccttttaaactctgctgagcataggatcatctggtgttccaccaccctactcacttatgctttggccaagagattcaaatgcctagagaggcagtttgaaatttcaaaggtcacagttatttggcggaagtctcactctgcctcatcgactgtggtcctgtgttgtctcttttcccgtttccaactctatgccatttcactttattacagaagtatctttcctttcccccacatagttgcagcgtaagatccccccttctcttccctttcccctaattccaaagcacagatccagaaccccctcctaggcaggttaatgccccatttggtgttataggatctttacgaggctgagaaatggaagccagcagcctagcagctctgccggagagcaggaagccacaatgcagggaaagaggcagaaggagtctgggaggcgaagtctgccttttttgatgactgatgtaagggcttcgtacttgaacttttagttttatagttctataaaaggcagctgacaaaagagaacccgttttgggagggtccagctggccggactgagctgggtggggcggtcccaacacatgaaagccagggctgattttcatccatgatgtcagagaggcgatgggattcccactgagccagaggataggagagcagacagttccagcccgggccctgccaatgccggcaacagtttcaatcctggcttcctggctcttctgcaagatccttttcctcctcggagactctttgcagtgtttggaagggaagctctctcgctcagcctgcgggtgtctgctgaggcaggagagccgctggcctccctccttggcttcctggctcccctatacctctgcttggctcggctctctatttcctttcgtttcagtggaggatgcagggagactgacagggctggctgtgcaggggcccacagcgttttacagacttatagtcctgagctcttgcattgcagccccccacttctggatttggtgggggacaacctctgctcccttctctgactcagactcagaccctggactccacaactggagaagctgctcaacatacgaaaagtggttggggtggatggttgttttcaattaaatctaatctgaagaaacatggggggctttttggttggtgtgtgtgtgtgtgtgtgtgtgtgtgtttgttttttgttttttttttttttttttttttttttttttggtcgtttttctttttgcttattcacatcaaactattgcgctggcccaagcctgcagtttcatgcggacaaagcaggtctctctccaagccctgggggctgggggtgaagcaactgctactcactcagctctgactcagaggaggttcctttttcctggccagaagcagcgctgcccagttccagggagaggctgggaggagcaatggaagggagcccagaagggcagttgcagagggtgccgagcgctggtttcctgattcacgaaggtttcagaagccgagtggctctggccagcaggcaggtcccacgacgcgcctaatctgcatgatcagctccttcttttggagactgaccagatttacccccatgagccctggtagcaaggccaggagaacagggttagagcaaaatcccagggtaacgctgctgaatggcctaaagtactgaggccatccatcatcaaaaaatgatcgtgctatactatttaaatttgctttggtgttttcttggtgtttctttgggctgtctagcaacacatcattcctgcactcattccttcatcaaaacgccaaatgttattttctggacctactatgcacgtgctagttactactgaacaatggagaggcatttggtaagtgagcctgaaataacttagtgccttattgatgaactaattcccagaaaccagggctttttttttttcttttttttttaaacaaaggccataaggtatgtgttttcctctgtaccaagtggggctgggcattgggggtggccctctgacccccatgacctacctttggtggtacacatggttccctcaagactgtccccttctttctaataggaagggtccagattggagataaagttcaagatctcccaaggagaatggaaatggagcttcctctgccagagcaatgaggagagagtgtacaactttccacattctacttcctcccttctcttctttttgctttcctttgttcattttttattcattaaatattcactgagtggcaattgatagcctccttactatgcagcattgctataaattaaatatgtaaatcaaatatgtatagtaaaaaaagaaatctaacaaagcaacctataagcttggtaagaaataagtggagtgtggccaggcgcggtggctcacgcctgtaatcccagcactttgggaggcagaggcaggcagatcacgaggtcaggagatcgagaccatcctggctaacatggtgaaaccctatctccactaaaaatacaaaaaattagctgggcatggcagcgggtgcctgtagtcccagctactcggaaggctgaggcaggagaatggcgtgaatctggaaggtggagcttgcagtgaaccgagatcgcaccactgcactccagcctgggcgacagagcgagactccatctcaaaaaatataaaataaaataaaataaaataagtggggtgtattaggagtgttgcatagcatgtgagagcagacacagacctcgcttctgactatcttagtgaggtcacagaaaatgcttgattaaacaacatgctttttaaggccctttttcattatctcatttaccattccaatggtcagagagaacaggaccagaggggttatgcccattataaagatgaataaactgtgtggtttgcagttaagtaacttgcctttttgtagccaaatatgtagttcctggcagaaaaagaactttaggacttagagtaactaacagaggactgcagcagctgtaccagactgggtaaatattggtgcatcaaaggatgtatatttttcttccttttttcttaatactttgggtagagataaaacttaaaagagcatgctagttgatccatgttctaatattgcctgctttagaagccagggagatggtagcatgagaaggacttggcccaccattgttggctttgaagatggagaaggggccagcagctaaggaacgcaggcagcctctagaagttgaaaaggcaaggaaatgaattcttcccagggaatccagaaagaaacacagccctgccaatatcttgatttcagctcacggagacccatttcagttctgacttccagaactgtaagataatacattcaggttgttttaggccattaactttgtgttcatctgttacagcatctatttgaaactaatatagaaggataaatttcagtctggataaccctggctgaattcccactggtcacccacaagcatatgtatggataattgcctgtacacatgagttacaaaacaagatggctatgagggctttgagaatttcccagtctagctaattctctgaagccacttacaggatattcctatgccagggacaatcagcattagtgaatctgtctcctcgctgcctcctcactgcctgcctccattgtttttaacagtggtttgccactgaggtcaacaccaggttcaggggcccggctgtagagcacatagacagggtaacagctgtgctgcacaagacacctcatggctcgcatttgttggcaaaatgcagcttcaacaagtcacaacctgtaaaagaaaccacaaagcccagagctcttcgagaaagtcaggaccacggacatcaaacagcaagtttgactgcacctccatgaactcctgatgtcaagacatcttctctccctacctgtggacagaggacaggtagtcatcctgatatgatgctaactttggcagtcaatagaggctgaaggtgatcatgaccccatctgtgaaactcataggaaaccctcagcagaggtggtcataaggttatacaaactccaggctctttgcctggaaagccatacaagcacctgtaagtcagaattatggaaaggtacttggtgcttggcaggtaaactataagcaggaagatgctttcttgcttaatttttccccttaagaaaatattcaattttataacataatcatactgatgagcatataagggagtggtccttgttctcagcataacttaagagttcaaagccctgtggtccatttcccttctctacctctccctggttgtgggactccttagccttcttgagccccatctggctcctttgcaaagaggagataatactagtacattcattgtgtggcttggaagatgtaatgagaaaatgactgaaaagtgactagcacattacagacaatcaataaatactaacttccttgtttcattccttctcttctatataaaattaaggtatattacccatattggtcctgatccttcactgggatgaaggatctagccctctgcctttaaaagggaccctaaatagttcccaaaatggcaggaactattatgttttaaaaataggtttattttttacaggctcacgcctgtaatcccaacacttagggaggctgaggcaggcggatcaccagatgtcaggagttcaagaccagcctggccaacatggcgaaaccctatctctactaaaaatacaaaagttacctggtgtagtggtgggcacctgtaatcccagctactcggaaggctgaggcaggaaaattgcttgaaccctggaggcagaggttttagtgagccaagatggcgctactgcactctagcctgggtgacagagccagactgtctcaaaaaaaaaaaaaaaaaaaaaaaaaaaaaaaaaaacgacagtggatcatacaggttctacagctcctattggcccaccttgccttctgacccctcgagtccatttgcatttttcttttttttttccagacggagtttcactcttgtcacccaggctggggtgcagtgccgtgatctcagctcactgcaacctccgcctcccgggttcaagcaattctcctgcctcagcctcctgagtagctgggattacaggcgtgtgccaccacggccggctaattttttgtatttttagtagagccaaggttgggtttcatcatgttggccaggctggtctcaaactcctgacctcaggtgatccacccaccttggtctcccaaagtgcagggattacaggcgtgagccactatacctggccacccacttgcttttattctgtcctcagcagtgatacaaactgttcctaccctctgcctacacacagtgcagctctttgcagttccttgagactgtttcctccatgtcacatgggtggcatttaggaggctcttgattgaagatatgtgtttactaaaaagttgttaagtcttcaggaattcaaattctcacatccaatgtcatgctataaaaagattcattcaccaagtccccatgacacattccttctctccacacttataggaacagaaggatgccatgatggtttaatcagggaagcatgtcccaaagacagttgcctgtaggctcctgggtctcaaatttgacccaaggctgggatgatggaatgccattcccatctggtaactggtttcttggcttgggagacagaaacccagatctctgggccaggttctcagcaggccttcccttctgttgttttcccttgtcccctaaaccttgtcactggaagtagagatgactctttggtgcctatgtccctagaacaggaacttcattctttctaatgaggtattctctgaattctcccacaaccaccagaggtaggaaaaagagaggggagacagaggacttagtgttgtaagctctttagggtcactgccatgagcttggttcagggtctggttctgttcaaccatctgcagcactttctctaggccttggtttctcctctgtaaaatggcatgggcactaacctgaaattagacgagaggaatttatttcactatttccctattatttcactgttgtaaaatagttgatagttcttgataccttactactatttgccaaagatcttcttcctaaaaatttgcacatgtcaacatgttgaatctacataacactcctatgactgggtgaatttttaattcccattttacaaaatgaggtaagtgaggcttagcaaggtttggtaacttatacagtcaccttagctaataagaggtgaatctagaggtatcatttcagagaatattctcacctttacatatttgtatctctaaatagttgttcaagatagcttcttagaagtgctatttctagatcaaaaggtataaccttttgttctttttaaggttctaatgtgtattgacaaattgttttacatgaacactccccaccaacagtatatgacgctgttcaaatcaagacaccctgactccaaacactgttacattattctggtttattttgctgttctttgctaactagtgaagctaaacttctatatgttcatatgttgatacctttgtgctttctccagtgaaatgtctattcataccctctgcctatttccaactcagagttttttcaataaatttggaaggacctttttgatacttaaggatatcattcttccccttgccatatttgtctcaagtgttttgttttgtttctgagtttgctgtttgccttttaattattttataatgcttttcatggaaagatgaattagcagagtttctccgtaaagggccagatagtaaatattttagactttgtggcccatatgttctctatcacaactactcagtgctgcctgccattgtagctgggaagcaaggctagatgatacaaaaactaatgggtgtggctggatttgggctgtgggtcatagtttgcagagccttgatgtaaacaatttttaattcttatgttagaaaacccaccaattgctcctctttgagattttttccactgcttttacatgcatgtaacccagatacttgagaggcagcttctgctctgtggagactggtgaaatccagcccaaactccaatgtggtacttggtaatagttcaatatcttgctcttccctgtcacttcttccacctaccctccacacacatgtcttcatactcctttgctttccttccttttgcttctcttttgggcttcttcctcccttccttattggagtatcaagcaaactcttctccttgtctccagcagggagagtttatcacactcaggccccttagttgcctcctgttctagttactggaactttttctaacaaatgagttccattcataagtagaagtggaattgaggtgaatacaattttctccatctcatcatacacaggcaaactaatccaaactcaagatcagagatctatccatctatgctttattttggtttctttttgtgcattggactatttagtccttttggtctttatattgtggtgtatgctttgagaaaagatgccaactttacttcaaatacttaaccacttatcccaaaaatagactttagtatacaaagaagaatgagtttatgattacatttggcattcaaaattagagcagaaagaatcattaaatgatgcagggacatctctgctcatttctctgcctatcactttttctaccaccaccatgctgttttgattataatctaccataatagctctaaaaattttccttggctactttaccatttctccttccagataaaagttagaatcaccttgatccacactattaggattttcattaacattatttaaatcataacataatggaagagtaatatatacacttaatcatttaatctctgacccaggaatatctatgcaaatcttttgtgtgatttttacatccaccatggttaatgaaagaaccgtttatttccttctatttaaaaatggccatagttcttttattgggtctttgttttctcccctccatattgatcattttcctttttgtcttgtctatttttaacctttctctctgcagtctgggagtttcttaaatttccttcatatcattgattacattttttacagtatgaattccactctttaccatctccaaggcaaacatcattcctttttttttttttttcgagacggagtctcgctctgccacccaggctggagtgcagtggcacaatctgggctaactgcaagctccatctcccaggttcacaccattcccctgcctcagcctcccgagtagctgggactacaggtacccgccaccacgcctggttaatttttttggatttttagtagagacggggtttcaccctgttagccaggatagtcttgatctcttgacctcatgatccacccgcctcggcctcccagagtgctgggattacaggcgtgagccaccgtgcccggcccatcatttctaacattacaacttctgcttctttgcagttattctatttctcttcaaactcctttttattctttattgactttgttctactcagaggaattaagaatgattggactctatgaaaccaaaagtaaaatccaagaagaggaaagaacaggttaaaatgaaaagactgacaaagtttttttttcttttttgaattatattcctttctatagaaagtaatttccagaagtatactttttctttcagttttcaaggtaaagtagtttgcttagtgtagacttttttctcccataagtatgctgactttttttctctttctcttggaaggaagagacttttatgtctctcaggagtgtttgcaagtggcttctgcctttggatttcccttagttgctctcaccattcacctacagactgactgaaactgcatcttaactggagggtaagttgaaaacgtaaatgaacccataaatcaatgaattatagagggacaggttaatgaacacattccccaactccttctccagaaacacgatgaagattcctgccaagatgttcatggacttccaggtctaacactactgtatgctgtgatctacagatggtgacatttgtgaagtgctcctctgagatgtcagagatataccccatacgactctgcagcaggactgcacagagccatgggaacctgccaggggtgtaggaggcagagctactcttccccacagatctcatttccaggcacagaagatgcaagcagcgactcagcctgtgactcagtgattcctacctgtgtgggtgctgattacatgaatcccaaaggttaaacacgggccacagggcactgagtattggtcttgtgcagcacaacagctaggtgggggccagaaggacccttgaaaggaggtactatctatgcccccttgggatccagcagcaggtgtggtaacattaaaatgggatgggagaaagtgaattatgaagccccacacagctattttgtatctctagtcaggtatgaaagcatttttctgaagggcagtatcacgtagtggttaaaagctcaaagtctgtctcagacgtaggaatttctattagtctgccattttggtttgcctcctcatgaaggcgagggaggagtaccagcttaccagcttgccattggggccatgcagctagtttcagccaataagctgtgagcagaagtgatccgtgtcattcccagaatataaccgctagtgagacttcccagcactgtcttccctgctatggcatccatggggctatgtgcccaggttgtgacgtttcaagatagtaaggcctcccttattctgggccttggagtaattgtctaggtgtgtaacgtaagtaacaataaacttgttgcgtcgtgccatataatttgagggttgtaggtgagctttgagggttattggtgggttttgattactacagtataacctagtttattcttacaaatacaatctcttcttaactgagtgatcatgagcaactctgaacttctgagtatcgatttcctcatttgtcaaagggagaaaattgcagcacgcgcctcataaaatggataaaaaacatttgcttgtcaagtgcctagggacgtgtccagtatataatgagtgtcttacaaatgttacctctcagccaaatttgattgtccaggagatagaaagcaaaaagagaactcgtctgtcaaattatctcaactcatgtctaaaaagagaatcaaaagtctgaaaaaagaatcaaaagaaagagagagagagaagacaggagagagagaggagatgccctttgaaaacatatctcatttacagagcagttaatgggatcctcatcaaaacaaccaacactttattgcccaaatcacatatgccaatgtgttcaaagccccatgaaatctgaactacttcaactattttcagataaatatctgctgagaaaaaaaaaaaaaaaggctttaactccccagaacaacattcttctgcgtcattcctctccctcctaaatatatcccaagataggcagtggcagacctctgggaaaacaggaatgatttctagaagctcttccttaggttctcacagcaaggaggaaagcaggctcagggtgtggcatccctgcctgccttctccacacacacattctccttgaggtgtctcagcatagcagaggtgtggttaaggtgagtatcactccacccatcagacgtcttcttggccaagcctcatatgacccaaagtctcataaataaaactgtgcagtagcaggaatgatggggatgtattgactgtcctctgttgccttccccaatagactactgggtgtgtcaagaacaatctgccctcaacaaaatcatctttttctaaaaaattcattgaaagtctcctattcaagtatcccctagcctaggcaagcttgttgagtgaggcatgacaccatcacagcccagatgtggtggcaaagggctgtgatggtgtcaggcctcaaaaagctcaggaaggcctcacactggggctgcagggtgcttcccaagcatcacacttgggagagccagcttcccaatgggtgctgttctggcttgtcctgacggtaaccacacagtggagtcaccaatatcctaggacagttttgcagttctttgaagctagtgtggcatagtttagctcagaatctaagccccttctctggtgaggataatatcacaaagaccaggttttcccaaacacccatccagctccctactaaaaaaaaacgcatgaaccttccatttacatccatgttgggttgccaacatcctcctctgaaccaacatccaagaaagacgactcaccttaagaattaaagacacagcctgcctgggaacctggacacaaaattatttacatccatagtgacagcgtccaaagcctgtgcttaggtctttcaaagtggcagagtcaaagatgaaatggttggatcccaggcagaatttttttcaaccttacttcaaagggagcaacatttttgtagcccctccgcaaaaatgggataaatggtcctattgtcttgactctatcaatattggtagtggaggataacatgaagaccctatttcctccactctccatctgtactttgattcttgtagatatgcatccatctacttccatctgttctgtcaagtgcagagagaagatggtaactttttcaagaagtctaaaccaagttagaaaaatctcatcacacaggacctagaagcctccagttgtggaactctccagtccacaagcccaattccaatagcaaattgaagggtctggaaacaaaaagaggcgggaaactcacgcattcttgtatattttttatgctctctctgcctcttaattgtttttcatacaacattcacgattcataaaattcatgagttcatactagattcatactacattcatgttgagacctctaaaaggacatcactaagcctggtttctatgttatggactcaatacttcatcagtctcacaaggaagtccagaaacatcctgggaaagtgggaagtggaatgtggagtatctccttttgtttctcctcacaatcttaaatttcttctcttacccgtaatgaatccaagaagctataagatataaaataataattgatggactataatttcttttcttaaagttctatagttctggattttaatgatattaagatcatctgaatctagtccacaacatagcagttagtcatttgacatttctcactgacccacctccccaacccccagctgagtaatatggctcaaagataaaaagaactggttcttccttgttaagactgtttatctagggttaaatttctgaaatggatttctataattcatggaactcatttgcaaaccccaagtaaccaacatccactgatccaatgtttcctttccacaggctgcttctatcattcaagacagtaaaaaaatcaatgatatttctttcctgaactttcttccaattgattttacagatggggccctcactatgtacaatgccatgtaattcacaactaaaagaaggcatttctatgtggacaaacttttagctacattgaattctatcagataatgtacaaatttcagaggataaaaacagtctctttctcgtaaaggtcattcccacccattttcaagtcctcgtattacaaataaacattgagcacatactatgcacaaaacaattttggtctgtgtatttttcccataatactttcatatttcatttatttctctatgtcttctactcccctaaaaagccattattctgaaatgaaacttttttttgttttttagaagcaagctcaaggcacgctttctcaccttcaagcccagtccatgttcttaaagttgcagagagttgtctttcagggtccccttcaatgccaacgcccccccctccaccaccaccaattttcaagggacaataaatcatctatttccacactgaaactgaaactgacaactgctgagagcgtctgccaaagggtgtgtcatagccaaaggcagttagagtccctaccagcatcctgttctcagacttggggacctgagataccactggaatttgcctaaatgccagaatcaataacagagctcccagtggaaagttcaggatgtcccccagaccactccctcaacctgctgaatacaacatgcttcttgcaggaggatgctgtgtttatcaaccaggggaccctagagacgctgtacttgtaaccagtcagaatccaccacccctcatggcagagtgcttatgtattatttatcccactttttaagatgggagaatctgtctagtctataatactatttgaaatcatcacctttgataggcatcctcctttattaaatgtgcttatatgttgacatcctgctttctctgtttacatttccttaactttcagtcttcaagagaatacatgaaaacctaaaagatcaccatcacagacttcaaggcaaattttaagacaggaaagcttgatttaatttggtgtgttacatctattaaatggatgagaaacatgttccttagatggaatgagttgaagaaagaaatcaatcaggattgatgaataaaccagattgccttccaggtctttccaagttactggagccacagtgtggctttgttgtttggcttagaggaaattcccactacatcagcagaaacacattgaaagataacactaaacagaactttaaaaaaaaatctgcaattgagtttattatctcaaaattcaaagtatctaattaggaaattttttataattgtgtgtacacgtacacacaagaaaggaaagggatatagtgatacaaacagatcattagtactccatagaggtgggacattgaacataaattaaagaagcctttaccaaagtaaagcaacttggctgaaattttgctgtaagagagctacatggaatcaatgctaaagtctcagcaacagcctgcaaaaattaaggaaaataacctgctgagatacacaccatgtgttaagactactgtctgaagctatatagtacacagaagctagcttctttttttacccatctgatgctacatttgacaggcaatttacagtctgagtaaggcattaattgttttattaaagtggtaaaatagaatttagaatatatgcactacttaactttcacaccagattatcatgtagggtctggccagtctgcgatgtgtacagtaacactccatttttaacctgcttctcttccttacttttcatcaaacacaaatgcctgcagaggatgtgtacttcttttaaatgcatagagcaaaccaggtataaaagagagatgcccagctacttatgttgcaagtaaagataggccatcttgcattgtcttttaacactaaacaatgcctgtcttcacactgtacgtatgaggcagctaatttgagattctctgcttctacacactcatgctatgaaaatgtatgcacaccctcagctttaactgtcacttgtatgctgttggttgacaactctccaatctattttttccagttcttttatttctgcaaaattctacaagttcatctgactgtctggtaaacatccccacttaggtgtctgacaagcacctcaaacttactatctttcatgccaaaccgaagactgcttcacaaggggaattagaaccccatggcatatatattaagggagagtctgcaattcaagtaacatccaagccctaaccctttcctgtcatatcctgcaagatccctccttatcttctctcaccctccctcacacccactctgccccaagcacatgggaccttcattacattcacaagtctggatcactccaaccaggaagactttgcatttgcagttcactttctagatgcttctctaatatttgcatatctgtgctctgataaccacacaagtctcagctcaaaggaagctcttccaagaggattttcctgtcctgcaggctcctctttccctgtctctctctattgctgtaccctgatttatcttatttatgttatcttcaacatcaaaagctcttattccttttaaaaatgctttattccccccaacgacagcagcaactttgcccgccttagttaatattacgctggagcagtgctggcacgtagtgggccttcactaaatgtgtgttgaacagatgaatgagtgaatgaatccatgaatcatcattcccctgtagatgtgttcttccccctttttccgccaccttggcaaatgttgctgccattcacccaattactccaaccaaaaagttaggtttcatcctaggtacttctcttacttaaacccattataaaattatccccaaaaattctcttctaaagtatttctgaaatctaaccccaccccactgcctctgggtcactgccttagttgaaagatccctctttgtgcaccacagtgattacccctcttgatttcaatcccttccactcaattgaagcttgctaatttaaagtgttgatctaaatctgatcatatcacttctcttctcaacagtccttcaatggcttctcattgtttaagggtaaaatatgaattccctattatattctgctaggtttttcatgagctgtaccctgtgtgccaatctagtctcttcccccactacctcttgcttatcaacttcaagcatacagcacgtgctctccttccactccttggttggctctgctcaggtgctctactctgcctgaaatgcccatcatacatacatggacctactgtgtgataaattgctactaaccagtaaaggcttacctcaggcattttccaacttgtccaatctcacgtatcagatttttcacatcataatattcttttgacatgtctgttttctcttcttagactatgaagtctttgaggggctgtgccttcttctctctttttttagaatctagtatatgacctagcccttagaaggtactttaaaatgtttgttctcatggagtaggtagagacatgtcattaaatatctaacagatggccagacacagtggctcacacttgtaatcccagcactttgggaggctgaggcaggcggatcacctgaagtcaggagttcaagaccagcctggccaacatggcaaaatcccatctctactaaaaacacaaaaattagcaggacatggtgatgcatgcctgtagctccagctacttgcgaggctgaggcaggagaatcacttgaacctgggatgcagaagttgcagtgagccaagactgcaccactgcactccactctgggtgacaaagcaagactccatcccagtaaataaataaataaataattatctaacagatatatgttatggtgagttttaatcaattataatcctctggaatttcttgatgatatattgacttctaactaggagccatcattcaaatcctgaaaagatcacaactcccatcaaagcatctatttcaggctgggcgagtgtagagggcttcagtaatcactacagaatgtgataaagagaaccaaacccaggctctgccggctctgagctctcctcactttaattattcagaatttgtacatgcttagtcttcttattacagcatagtcatctgcttttaactttttaataatgagagaaggcttctgcttcaagctctgatagataattggtattggaattgctctcctctgtaaacaatgataaaattgaacaacacaaataaggcacctgtttctaggcacagcaaactagacagccctctactgagactttttttttttttttttttttttggtgacggagtctcgctctgtcgcccaggctggagcgcagtggcgcgatctcggctcactgcaagctccacctcccgggttcacgccgttctcctgcctcagcctcccaggtagctgagactacaggcgcccaccaccgtgcccagctaatcttttgtattttcagtagagatggggtttcaccatgttagcctagatggtctcaatctcctgaccacgtgatctgcccgcctcggcttcccaaagtgctgggattacaggtgagattcttgaaataaggaaaatggataaagtaaaccccatgttcacctgggctctctgccagggacaatttcccaactgtggcacatggaagtagaacccaaagagcatagcagtcctgctgagctgaggaggccatgatctgagtttaggaatactaatgaaaatggaaatttcagggcattattctagaaaaagtggaagtgcatgggttggggaaagtaaggagtgctatgagaggtctgtgtgtggttctctacaagactaagggctgtgctgcaaatgtgcatggtgagactccatgaggctttggagacagactactttgaggttgacaataaaaatcaagactttagagatcactgctatgggtttgaatatttgattctccaaatctcatgttgaaatttgatccccaatgttgtaagtggggcctaatgggacgtcatggggcagatccctcatgaatttcttggtgctggccttcaggtaatgagtaggttctcattcaattagttctcatgaaagctggttgttaaagagaatcaggcacctcccttctctcttgcttccttctctctccacattatctctgcataccctggctcccctttgccttccaccacgagtggaagcagcttcaagtcctccaggtgcagatgctggcagcatgtttcttgtacagcctgcagaactatgaggcaaataaacctcttttacttatgaattaacacgcttcgtgtattattttatagcgatataaaaatggagggaaggaacccaagatggctgaatagatgcagctaggaagagcatctttcaccaggataccaaaccatcaagaagacaggcactctcagcagatcttcaggaggaaggcactgagagtgaacagaaggaggatgtagactgagggctgaagtgggaggaaagtaggagccctgcacagggctgctgatcataaagactcattcctggcccccagcaactcctggggaaggggtgactttagtaggtgaggactggcccattctcaccatagacctccagaatcctagctacaggagaccccatgaccctcatggatatttgatctgacagagagcagcttggaggagtggcagggacaggactccagcctgtgcagagcccagagggtttggcataggaaagactgcagtagagcatggtcaaggatgcccatcctccaaagcttacaatgtacctctaggtggttttgaccctttttgactgtcagacctggatagagcagggttattttgcccattggatggaaccagtgtgatctgagtgtccccatctgccagcctttcctagagttcctgcttggccatgcccatttgcagcacagcctcggatgcctaactgaggttcttcccagtggccaccaccacagctcctgtcccagcacacaccacctaacaatcagagagcttcagcagggcagtcttcactgacaagcacccccctgcagcctcttcccactgtttggcaggtgcacaatcaccagcagtctctcccaactgcttggccggcatgcactaacctgcagcctcctctcactgcttggccagcatgcattcacgtgcagcctccccgcactgctttgccagcatatacgtagacatcacagccctcgcaccaccggcatgagtgcacatgtgtgggccccagtgccccactgacactggtgggagtgtgcatgtgcagaccctgccaccccaccaccactggtgcaagtgtgcatagcccgctgccccaccaccatctgcaagtgcacaatcctggctgtaccacctccactatgcacatgcatgggaaccaccacatagctgccagcggcatgacagcaggcatgctgacactgctgccagcagactgggaacaccttggccccttcagcacagcaggtgatttacctcgggaggaacagagaacaaagctgtgggcctggtaatagtgttagagcacacagcctggaaggcagagttgagcactgggccccaataacatccagaaatgaaaacagtcaactgaactcaacttttaccacagttaaaccctcgaagctaccaaagaatataaaagcaaaatatcctatccagaggacagcaacttcaaagattaaaagaatatcaccccacagagacgagaatgaaccaatgtaaaacctctggcaactcaaaaagccagagtgtcttacctccagatgactgtactagcaccctagcaatggctcttaaccaggatgaaatggctgaaatgacacagaattcagaatctgaatagcaacaaaaatgactgagattcagaagaaagttgaaaccaatccaagaaatctaaggaaccaaataaaatgatacaagagctgaaagacagtaattttaaggaagaaataaagtaatctgatacagctgaaaaactcactacacaattttcataatccaatcagaagtattaacagcaaagaccaagctgaagaaaaaacactaacaataaatatcaatatttagattctgtgaacttttaacaagtgatttggtttgtttatgaatagaggactatagtgtgctatctaagcaactagatggaattgtttcaaaatatgaatgagtatattacatgtgattcctgtcttcaaaatttcaataaatctctgtccatctcttatgacagcatattacccagcatattattttgcttacatgtcttatcttcttcctagattaaaagctcactgagagttcaaacgctggagaaatatttaccaagcccctatcactcagtaagtatgtcagacattgaagacacactaggaacaagtttcaccagaagcttacagactactggaggaaaattacaagtgagcagacaattctaagaaggaagtcaatgattatagatgtgatagatatttgacagaattaatggacaaatattctcaatttaagagtctgcatttctaaattaagtccaaccacagcctaaagaatcctgaggcatctccatgcgctggcagctagcagagaagaaagccaaatatcaaatgggaactaaagccccttaataggatttgccctgataatttggcattacataaagcaacaaagtaagggcattctacactctattctggtaaagcacaagtaatatcttttaaatacatcatatgaacgataatgtctttgtcattctttagccttaatttaattgtaaagaaatgtagcatcatgttttgtcccataaagaggaaaataatccatgcatagtttcatccaatgaaaacaactcaatatgaggtctatactcctaaatatctatttcccaattatattttcctcttttatttttgtggatttggcattaaatccaacttgagtcctgatgcaggtcttacacagtgttgctactgttgtttctattggagatgggtctccaccaaaacattgaagggacactgattcaccatgttatggctttgtcaatgacaaaattgcaagaattcaatgtcacttctggtaacattacccagaaaacaatgccatagtctaataaggacagacaagggcaatcaaataatatggaattcagaatccacttatctaagcacacagtcctgagtatttcaggaaagatacttggctaagttaattaacctttgtcatctttcagaagaaccgtttttacccatatcagtgaaaacatcccataagccccctttattgtacattgtgctgtagagcagccaactctcctttattgaccacatcactgacccttccccacccttccgtgctggcctgcccctatcttgttcagctcttcattcctcctacatgtgactcaaaagtgatgaatattgactaatccaactcaatcatggtattccttttctccttgagagggattgatttaaaaaaaaagatgcatgactcaattcttactaatgaaacataaggaaagtctgaggggaaacgtttcagggaatgtttttcttgttactataaagaactagaaagcaaaggcccctttttgcataggataatgtctgtgacccttgaaactgcaggacccatcttgcacatgccaggaaagctggatgaagacaaggataatatgctaagaatgggccaggcacagtggctcacgcctgtaatcccagcactttgggaggccaaggcaggcggatcacgaggccaggaggtcaagaccagccagtctgagaccagcctggccaacacggtgaaaccccgtctctattaaaaatacaaaaattagccaggtgtggtggtgtgcacctgtaatcccagctactcgggaggctgaggcaggagaattgcttgaacccaggaggcggaggttgcagtgagccaagattgcgccactgcactccagcctatgtgacagagaaagattcagtcttggaaaaaaaaattatatataaatatataaatttttatatatatttatatatagattttaaatatatattttatatttctctatacaattatctatatatgtatatatgtatgtacatatatgtatgtgtgtatatatagagagagagagagaatgacaaagcagttgcaaagaacccaagtccctgaagaatgtctctgacctgaagaattaatcaaacctacatttccctatcaataggatattttattgtgtcacttaaactttcttattgagacagtcgtgtcacaatttttttttcctgaacctaaggggatcctgatacaagtctctctttttgtccatttctaggatgatcactgattcaagattgcagaagattaaagatgaagacgtgcaatggggaatatgtaggaggaaaggggacttgagttaccatggcaactgaaattcaatgtaacatcactccaaaaatgttctgttagtttggggagaatttaccaagttagtatcccacaatttgtatcataacccacaagctaccaggcaggaatggggcataggagtgtcatcctgaagctagtaatttcattctagtggaaatcagcaggctaggagctggagtgaacctctgggaaaagtaaccagattccagtttcatcttttttcaacttcaagaagccaaactctgcttccagaataaatctgacatcacagaaagacaagctttgcatgttctcatttatttgtgggtgctaaaacttaaaacaattgaactcatgaagacagaaggatggctaccagaggctacagtcaatagtaattacgtacactttaaaataatgaaaagagtatcaatggattgtttgtaacacaaagaaatgagaaacgcttgaagtgatggataccccatgtaccctgatgtgattattatgcgttgtatgcctttatcaaaatatctcgtatacctcataaatttacacacctaccgcatacccacaaaaatgtccaaaaaaaaaaaaataagctgggtatttgagaactaactgctttgctgaccttggtacataataatggcaacttttaaccaataccctccattctcagccagtatcaagtaagcaacaaggttataaaccaagcaataaaaggacaagaccaataagtaattttgtagtcatttttcatatgaaatcaagtaaattcacactaacaagccttatgtagttgcctattgtatgatcggcatggtcttagatactatcattcctttgattgacatagcattaggccacaatctctgccttttgaattatcgtctgaaagagacgagaaaataggcatgtgtcaaataattacagctggaaagaaagcaaaagtattatagttcaaaatatgcacagaagtatgaacgcaacaatgaataaatgacgggtcataaaatgcagttggtcaaggaaagattttgggggattgaggcattgaactaggttgtgaatgaattgatgactatgaatctaaagactgaagttactgacttgggtaagaagatcattttgagtaggtgattcaacaggaggaaagccacccaacagaagcaaaagacaactaaggcagcaaatacaagcctacaatatatccaggaaagcttaaggaagacttaagtgcctgaaacaaaactggccacattttgaacactgaaatatgaaccctgacatggaactaagcagctagtatatgctgagtgtacacacacattaacccattaattctcaatacaaacacaggaaaaaacatagctatgagggaattaaaggtcaacaaatttgagacccttgcctaatcgggaacagctgataaacagaattcaaaatccaatttatttctccttgatactaaaattcacgttttccagagtatctctgcttttcaaaaacataattatcagaggtctcaaatgccaggaggaaaaaataatctatatcaaagatgcaaaagaaatgtccagaagtagtacttactggagtgtgttcacccagttcacctccccacttcttatgtaaattatacgcaaagcactgcactttagacgtgttcatattttcctagacatgacaaatggccagtgtaatatcattttgcaaaatagtacaagaccatttcttatatctcttccttatatattatctctcatggcttcctaacatctcaaaatttccacattatttgcttatttttgtaaatccagaggaaaagtaggctctctaaacaccatcttggattagccatcacattaactttctttaacaatttaagagaaagatttggtaaggcatgtgaccgatgaaaataagtatatgggagaactcagcccagtttatctgcagtctgccttcagcgcatctaacaagggtttacctgcccagacatagttgtaataacccaactcttcaagccatcatacaaaagtaaattggagcagaggtgattcccaggaattgaatgcataacttagggtaaagtcacctagaagtctcccattaaaactttgttttcctggaatgaagacatgggatggagggagttggggtacagacgagtggaaacatatttgtgtgccaaaatctgtacttaaataagtttttatttcattctcatttgaaccctctagtttagggtattactactcccatcttatagatgagaaaaataagtatcagagaaattaatttgtccaaagtcatcagtgaaaacctaattgcggctgggtgtggtggctcatgcctgtaagcccaggacttcggaaggtcaaggcaggtggatcgcttgagcccagaggttcaagaccagcgtgggcaacatagcaagatcctgtctctataaacaaacattttttttaaaagtaacctaatcaatctaacatctgagctaacaaatcatccagggaagaactttgagaacttttacccaaagtaatagaatatatggaatatacctttcattttgttacatttccaggaagagtaatatatgagttaatcgaggtagtttttaaaacctgaaactttataacaataacagagtgttatcttaaaatagtctcgtcttatttaagatctactatgtacttgacttggtgctgaaaacgggattcaaaacgccctgatgagatctaacctctcatttttctctaggccggtcaaacccacagcatgcatatgaaggttgaaaccaaaaaagcactaaccatagagttcaggtttacaatgttaaaaaaaaaaaaaaaaaaaaaaatcctggtatttacatatgattcacatcaaatgaataaatgacatgaattcgcatcatttttcttagttaacagcttaaccacttgattctagggttgcaccagtttaccggggatagacttaagaaaacctaggccagaaagctactggtttcacatcaaactccaggagtaattagaaagagagcaaacagaagcatttggttttcaggaaacaatttctggtctgtcccatttgcacacgcaagaggcagcaaaactgcatcttacggagatctgactgggggaaaaaggtggcgaaaagtgggtggagaatcaggaaaaaggcagtctggatatgagaccccctgcagtcagccagattcaattgctaagtctcaggaaaccctgaactatttctcctggaaattaaactgagatttgaaactaatgaggggccaaagtatagaagagtgttggatagcatgtgcagctaattatttcattcagggagccaaagggaccttgggacatttccatacagcctataaactagagaaattaatcctaaaagcttagaggaaaaaattaggttcccatcatgaaagtgcagattttgaatttgttgataatttcacctcaccttcctaggaggttacactaagaccaggtagaaaatttcattctcaattaagatcaatctggctctctagtgaaaatttggctgggaacagaaggagtgctggagtgctctaatgaggtaagtcctaggctgctgtaatatcttcacctaagaattcagtgttctatgggtgcaatgttgtttgcataggggaattctttcataagaaggggaagggagtcaatacatgtcatcaggaatcatgctatctagtcattcaagttactaggtttaggcactctgtatacagggtcctatcttgctacttcaataagggttagaaggccgggcgcggtgactcacgcctgtaatcccagcgctttgagaggtcgaggcgggcagatcacgaggtcaggagatcgagaccatcctggctaacaaggtgaaaccccatctctactaaaaatacaaaaaattagccgggcatggttgtgggagcctgtaatcccagctactcgagaggctgaggcaggagaatggcgtgaacctgggagacagagcttgcagtgagccgagaatgctccactgaactccagcctgggcgacagagcgagactccatctcaaaataataataataataataatagatagatagatagatagattgaaaggctagagattttttttttaatagggaagtcagcttctctgaaggagtttcaaattaggtgctatctacaatacatgacataactctctgaaacataaaattatagttctgtgtcatttaatgacagagatcctttctgagaattatttctcctaagctacaatcctatacaatatattactgtgctgaatgaagtaggcaattgtaacacaatgaccagtatttgtatatgcaaacatatcaaaacatagaaaaggttcagtaaaatatggtataaaagagaaaaagatggtacacctgtataaggcacttaccatgaacagagcttgcaggactggaagttgctgtgggtcagtggtgagtgaatgtgagggactaggacattactgtacatgactatagactttataaacactacacttaggctacactaaatctattttaaaaagtgtttttcgggccgggtacggtggctcacgcctgtaatcccagcactttgggaggctgaggcgggtggatcacctgaggccaggagtttaagaccagcctggccaacatgacgaaaccctgtctctactaaaaacacaaaaattagctgggcgtggtggcacatgcctataatcccagctactcaggatgctgaggtaggagaattgcttgaacccgagaggcggaggttgcaatgagctgagattgcaccattgcaccccagcctgggcgacagagcgagactgtctcaaaaaaatatataaaataagtttttctttcttcaataacaagttaaccttagcttactataacttcttactttataaacattccaattttttaaaactttgactattttgtaatagcactcagattaaaacacaaacacattgtatagctgtacaaaaatattttctttatgcccttactttataagcctttttcctattttgaaattatttattttttgctttttaaacacttttgttaaaaacgaaaacacaaacacacacgttagcttaagcctaacacaggatcagggttataaatatcactctcttccacctccacatcttgtcccactggaagctcttcaggggcaataatatgcatggagctgtcatctcctgtgatagcaatgctgccttatggagcacctcctgaaggacctgaggctgttttacagttcactttttaaaaaaatgtaagtagaaggagtactctctaaaatagtgttagaagcatagtatagtaaatacataaaccagtaacagtcgtttattgtcactattaagtattaggtaccatatgtacttgtacatgctagagctttatattattggcagtgtacgtttctttacatcagcatcaccacaaacccgtgaggaatatcttatcgcatggtgactacaatgtcaccaggtgataggaattttcagctccgttataatctaatgggaccattgtatatgcagcttgccattgaccaaaaagctgttatatggtgcatgactgtagcttgtccagttgttcccaaatcaggttgattcttagcatcactggtgggacttataaaagtcacacaaaagtcttcgtttccatccccagatcctgcttcattatgcgcaggcttttgtttggttttgttttgtttttttgagatggagtctcactttgttgcccaggctggagtacagtggcgcagtctcggctcactgcaacctctgcctccctggtttgagcgattctcatgcctcagccttctgagtagctgggattacaggcgtgtgctaccacatcagctaattttttgtatttttagtagagacggggtttcaccatgttggccaggctggtgtcgaactcctaacctcaggtgatccacccgcctcggcctcccaaagtactgggattacaggcatgagccactgcaccaggccagcacaggcatcctttaagatcccctggtaatactgatgatcagccagttttgtgaaatacttacctgatttataaagcatcaaacatctgggaatatggtaaactttgaaggattgttacaaatctccttcccaataagcattaacatgtagaagagcctaaatctaaaggagcacaaaaaggtagatgacaatgctataaacacttaattttttaaaagtgattttgtatactacatgtgccaatggggcagtcaatatatacacctagtacaaaaaagcaatcagcagttgctagctactgttatcaacagcatcatagtgtatgggctatccagagcaaggctgtgccaacattttatgtgaagagacaaatagcaaatattttagtttctgtgggcttatagtcactgtgaccactgttcaactctgcaatcgtggtgtaaaagcagccatagacagtacataaatgaatgagtatggctgtgtgccaatggaactttatttatggagactgccatttgaatttcatataatttttacatgccataaaatattttgtttttttcctccaaccatttaaaaatgtaaaaactattcttagcttgcggccatacagaaacaggctgcgggcctaatttggcccacggactttagtttgtcagctggtggtctagagtctaggttgttattcatggaacagtctgcaaagaaattattggatttgggtgtggggtgatccaataatcatccaatgtccacacacagccaagagtggacattttctgtgtcagaagaagacatagaaaattttagacatagaaattcatatttttactgaaccattgtactcttttgacattagctaaattctacctgctagtcacagggtcagcattggtgagtggctggtcccccatgatgccatgggcatggtacacctgccaccgaaaaagaaatctttgccatctctaagggctttcccaaccccggctgtaaagaacatctgattttcagcataatgtaaatcccagctttgcctgccagtaaattcatgtacatcatgttaacatcaggtttatattaaacatttacattaagaattggagtggaagattaaattgtttgcatgcattgccgtcacagaaggaatggcctcatcatcctccctgcccatggtgctgagtgccagcagactaatgatcagacagttacccatcagaaaggcaggtgagacactgatgcacaatccttgtcaaagctgggcagcctctgtccactctgcctgtgcccttggcaattatcagcaagctatgagctatactaccatcccctgccaagtgaggtttaatttatgacaccaaggataatgattcactccaacgcaatactcagaattactgtcttttcctctgaattagaattcttctacctacaaaatgacgtgctttttagtattttgattcaaatcagtcatgatcatgctggatgttgtagggttgaaaacatttggttgtgcaacttgaatattctgcaagagattaagctggggatagactaaaggtggttctaagtccagtctctaaggagcactgctgtcctttctctctgaaattcagatccagagagaaagagaagactctaagaggaactcaggtctgcaggttttcctgggccagttctccctgccatgaatatgaagagttgcccaggacactctaactagcaaatagtctgcagaacaaatgtttttgtgggggagaaaaaaccaacaaccatggacgccaagtcaagtggctagagaagagtgatgttgttaaagtgtatgattcattaagtcttgtctgcgtgtcagatgttcagcatttggtgctattgcctccaatttaaatcattttttaaagaagtgccgaaaaaggtgctgaaaggcacctcactctgttcccgcacttgaaaaacactgtctgcctgtgcactgtggtaaaactttgcattttggctagacaccctgtgtggagctgtgctgaagctggagggtttctttttttttttttcttttttttttttttaagtttgtacagtcacccaaaggcaggaagagaaaacagtgtttccccaagccaaagatccctcctgatggcatctgtgaaatagagagagaaagtgctgctatagtgagccttcccctgcagtgagaaaccctaccacaagtttccatgtagtgactgcctgcacgtaagagctgcctcccagtgcttttctgctgggagtccttctctcctagaattcttttcagaacccctggaatgtcaagagctgctgatcgtggtttatcatcaccagttacaagtaaggctagcattgatatctcaccttggattgttgtcagtacccaatgacctcacggagactcaatgtgttggttcctcgacaccccctaaatgcttctaggggtgtagctgccgcttcctcctcacacaaaaaggggtgacgcatgtctcaaggatgaatcttgcgaacatgatgctaaatgaaataagtcacgaaaggagaaatagtatatgattccacttatatgagatactgagagtagacaaatctatagagatagaaactagagtggtggctgccaggggctgagggaagagagataggtaattagtgtttagtgagtacagaatttcagttttataagatgaaaagcattctggagatgaatagtcgtgatggttgcacaacaatgtaaatgtacttaattccattaaattctacacttaaaaattgttaagatgataaatttatggtgtgtatattgtaccacagttaaaaaaaaaagatggtgcaggtcagaaagcggtcaggaaagtcccagttaagactccaaggacttccccaggttagtgtgacttggcattcatgaataaaatgtggctttctgggtattaatctgagatctgggcctccatattctcaagcactgtatgacaggcatgttatgaatttcatcagaactgcaattcctgctgatagaaacttccccggctcctcaggcgcttgctgacccaggcctttagcagtagctataagatgcttaagatttacctaaaaatgaaggtgatggtgtttcctccaattcaaagagaatacagcaggtggtaggctagggctgaagcttggttggggagagtagtgtattagtccattctcacactgctatgaagcaatacccgagactgggtaatttataaaggaaagaagtttaattgacttgcagttctgcagggctggggaggcctcaggaaacttacaatctggcagaaggggaagcaaacacatccttcacatggcagcagcacagagaagtgcagagtgaaggggggaaatgcctcttataaaaccatcagttctcatgagaactcactatcatgagaacagcccccatgatctagtcacctcccatggagtccctcccacaacacttggggattatgggaactataattcaaaatgagatttgggtggggacatagtcaaaccatatcaagtaggtagacacagacaggtaaaaattcacctatttgaaatataattgcaccaaggacataaacagactcttttcaaaagaagatatacacgtggcaaacaatcatatgaaaaaagctcaatatcactgaacattagagaaatgcaaatcaaaaccacaatgagataccatctaatactggtctgaatgactattattaaaaagtcaaaaaataactgatgctggcaaggttatggagaaacaggaatgcttatccactgttggtaggagtgtaaattagttcaaccattatggaagacagtgtggtgattcctcaaagacctaaagacaaaaattgaaccagcatttgacccagcaatcccattactgggtatatacccaaaggaatataaatcattctgttataaagacatcactattcacaatagcaaagacatggaatcaacataaatgcccaccaaagacagactggataaagaaacagtggtatgtatacacaatggaatacagcacagccataaaaacgaatgagatcatgccctttgcagggacatggatagaactggaggtcgttatccttagcaaactaacacaggaacagaaaaccaaatgctgcgtgttctcatttataagtgggagctaaatgatgagaacacatggacacagaagaataaaactcactggagccttttggagggtggagagtgggaggagggagaggatcaggaaagatgaccaaagggtacaaggcttaataccttggtcataaaataatttgtaccacaaacccccatgtgtcaaattcatccatgaaacaagcctgcacttgcacccctgaacttaaaggttaaaaaatgtatatataattacaccaagaaatagtaacgatgcataatttaacaatgcatagatttccaaatattttcacaaatatgaattcatagtcctcacatcaaacctgtaattaatggccaccattgaggtcctgtgatgttctaagcatcatgtttgcattgtttcatcttccatctagagtaagaggctcagagaagtcaaggccatttaaccagcaagtgaaagagatatgattctaagacacggttgttcagtggtgatggtggtggtgatttttgtgggttttttgcttttgtatttgttttgtaagctctaaatctggcactttgcctttttctgtaatataggagtcaaaaaggaaaggaaaggaggatgaaaccctagaggtctctaggtgatgaatcgattttaggctttcaaaaaagctgtattagcatcgcgttcattcccatctctccaaggctttggaaaacatccttttcagtaaggaatcaaaatcaagtcccctaaataaagcactggtagtatgaaacactgagacatatttttagtctcactgtgtccgttttgtagcagcataacatatgtgttgagcaaaaatatacacaatatttaaaaacaacaaaacaatcaccattattctcgccatctgatggccagtcgctgtgatgatttgttctttaggtcagcttctgtgtgccatcatctaaagagcaaactgcttcacatacctaccctaccttccctcctaccctgagtgcagatgctcacctaccctcatctttcctgcagaatgactatggacagatatccctaaatcacagactcgctaaacaaggagcctcagagcagacctctgcagggctgatcttaatcctttccagacaaatgagatatgatttcaaaaaatattcaggaaatgtgaattctcttcctaccttggtgacttgtgttgaagttttacgtatataatcagaaaaacttcgcttattattactgtcaggttcatcctgctgcaatttcacctccttaaaaaaagtggtgtccaattgtatggaaaccctttgaacataaaaatgaatttgtaaacaaacatactgagccgtggtagttaactcacagaataaagccatagtctgcgaaagaacaaagtgtagggagtcttttaatgactcatcctaatatgtttaaaatatgattcagtacagaaatatttgtgatatagaagacataataggggcacaattattgaatcagtttcgagacttgggcacatctgaatatatgtagacaatgccttcttcgtgtcagtttcatgtatctgtccctatcacatgttgtgccagcaaatgaaatttcctagctatatccacattgatgaagctttgctgtctgtatgaatctgcatctgcccatgaatgagtccatttcaagcacatgtacgtgtctgtgcatgggtagaaagataagcttagcaattgtgtgatttgtttctgcttaggcagtaagttactaatctcctgattggaaccagatttgtatgaattaggggttgaaattggaacagtcactgctgtgtgcaggatgtaaagtgaataaaatgaatggagtattaaccttcaaccactgaatattaatcagcttttcataagaaagaaaacacagagcttgccacactaaatattttcagcgcttattgacaggatatgatttcttttctctctcagccctgttacttccagtcaagggcctgaaaataccggacaatagtcaacttgacacagattaatatatgatttgaaaaaccccaggtactgagggtgggtaggattctgaatgtgtcaaatctgatgaaatgatatgcctttatcaaaagtgagcctgtcttccagtcactcctgcaaacactcctttgggccaaactaagcccaaagggaattcacagaaagaccgtggatgggaaaccttgatgaccacaaaacaaacatgtaagaagaatatattttccattgccatagaaaggacttgcaattaggaagtgattctgtttgggtatttggatgagacctacatccattccaaggggaattaagaaaagagtcatgtaataatggaatctgagtgaaaataaaacttgtaatattgcagttacttgtgcaatacttatgtaatattgcaattgcttttgttcaagaatgcaaagtcttgtatttatgtccatataataacatggcatatattatatagactttgacatatatatatatatatatatatatatatatatatatatatatagagagagagagagagagagagagagatagagagagagagagagagacagaaatatgtctctgtaggtagaaatatggacaaatagaaatatacataaagtatatctttatgcatgttttatgtatgttatatcatcaaagaaggcagtaaatttttgctcctgcagatattttgaagcagcagatattatatgctaacattatctgtatctataaagctacttgcacaatactacaaagagtacatttcatgtggctaggattaaattgtaattgaattcaacttttaaaactaagaaagggaaaagggagaagaaaaggatttcttctatacccagctcatgcaaattgttttcaaatattttctcaaatgtttaagaaattcagttttttcttaaactgaatttttatttaaaaagctatactttttaaaagctattttaaaagctatacttcaaatgaagacaatgtatgtttcaatagcattttattatttataaatcaggaggtacttctcaacctcaaacatatcagaccaatgttaagtaatgactgtttttccctttggaaaaagtctctcattttgtttttctctatggaaaacttctccctctatgctacctagcttagaaccccactgccctcatgtgctcttgccaaaaatttctaacccctgaccatctcaaacactgaagtaattaatctcccatgtaatttctcatgtagcaatttaaaaaaaaatcatcatactccttttagctggtagtaataccggaaatccacccattaggctaattccacaaaggtgttagtgactgataatggcttaatacaccctgtaggatggtgcagtacaaaggattgtaaagatccttttcttcatcccaagattcctgtcccttggttattcaaacactcaccttggtacttctgtgaagggactttgaagatgcaattaaggttgctaatcagctgaccttaaagtagggagactagcctggatcatccaggtaggctcaatgtaatcacatgagcccttaaaagaagaggaaggcagaggtatgtgcaagagaggaagccaaaggggaggtctaaatgagaattttgacttgacttgctagctctgaagaaggagcaagagagacaggagccaaggggtgcaggtgacccggctgacagccagcagggaaacagggacctccatcctgtaaccgcaaggaaatgaatttgacaacaatctgaatgaacttgattcttccccagagcctctagtaagaaacagccctgccaataccttgattttagcccagtgagacccaggttggactttttacctacagaaattaggagataataaatgtgtgttgttttaaaccactaggtttatggtaatttgttacggcagctatagaaaactaatacaggcaaccacagaaggctccagagaaagaaatttgttcatccaaatgaaaaaatgtcaaggaagcccaagaatagtctaggaaggagaagagtgttagggaagaaatagattgctgtgatagggcaatcttaaatcccatctctaggttacctgtatttaccattgcccctaagagattataccttctcacctccatgtcatggctagagtgtgattaactcttttattaaaaaatatttgcaaaaagaactaagcaagggtgacatagaaatcagtggcaccttccactggctttccaacacagtgtcttagcccatccaattcccattgaacatctcagaccttcagaaaagttagatggcttttctaaggtcatatagttggttattagtaaatcagaaacttgatttcaagtcctctactgtcttatcctaattttttcatgtcattaaccttaattcttacttattatgaaaactggctggaattcaaagagaatgcatttagtaaataggctacaagaaagtatgttgtattagcacatggaaaaggaatatagagacttatctggattatttatagctgaagtcacatcatcaataggtaatcccgggtgtctgactcaccgataacgcagaaaaaaataccaaagatagctagatacttgggagaaggagaattttggtttagatgacaaatcaatgcttcaataattctctattgcacttttctgaagatctcatggccacttggcaacattgaataaccttggtaccaacaagcctgagtctgccttagcagataaaatcaatttgtaatcctggaaggcaaattgaaaagccttaggaagaaaatgaaatgattcagcatacatattgagaatggaatccaggaactcaagacaggcaactgcccagttattttaagggagccttatttggagcacactggagtcctccccactccccacccatctgaattccaccagcattgccagcattatccttttggtgtcctgggtttgcccctttctgtctctcaaccaagagacctcaaccaagcacctctcaaccaagcatctcaacgctctgtcattcttgaccaagcacctcaaaccccagaatcctgaggccaataactcttgtactctgctgggttgcgagacccgaccacagatccatccccattccaagtcacctcattcaaaacatcccgagctggagaaagattcaggtggtttctgctggagctgatagatagctacccaacacatggagggaacccttaaaaaggtgaaatcatgtatgtaacatttcagctgagatcataaagaagtagaatgcacatcctccactttctagaatgagatccataaagaagcaaaatgattagggaaatatcctcaaaatacaattgatgagaaatgttcactttagaaattcctgtcgatatttcggttttggcctaataattgcattttagcttgccagagcctttacatctctagctgagcttaagataaattctgcaaggactacccagacttctacacatgtgcacacaaatacaaatccattccccaaatgttagtggcaacaaataaatggaaataatccaactcatttattataattggtctcaccaagaatgcaatgctaaagaaaatttggtaaattattcacctttgttgaaaagaatatttgtaaaaaagagacaccgtcatgtcttttggttttactgtttaaatttcaatagaatgtttaatataaaaataatatgcagctggagactttccatctaagttagcataatttcttgagtacttattttaaactcatctcaagcctaagttccaaggagtgtgtggaggaagctgcatcaatggggaagagaaagagagagagagagaaagagaagagacaaaaagagagaggaaaagagagaaagaggagagaggaaaagagaggaaaagagagaaagagaaacagagaaaaagagaaagaaagagaaagagagaaagagaaagaaacaaagagaaagagaaagaaagaaacaaagagaaagagaatctgcaaacgcacacgcaagcttcagtgtatggagaggagtgtatttataagctatcgagcctagtttcatcatttcttgaggacagctatactctggtcttgtgttctgagagatgctactcagaacaaaaattatcttattttgcttatatcattcttgatttctggtgagtcctttcaaaagtcctagatattgcacaaagcgattcctggcaggtcaaccttccactgataagttatactctacgtacatgcaaagagcatacagtgaaacacaattaactcatatagaaacatattaggaattaaggaagacccaaaacctggccttcattcgggtgatactttttttttctttttcttttttttctgttttgagacagtctcactctgttgcccaggctggagtacaatggcactatctcggctcactgcaacctccacctcccaggttcaagcaattctccgacttcagcctcctgagtagatgggactacaggtgcgtgccaccacacctggctaattttttctatttttagtagagacgggatatcaccatgttagccaggctggtctcgatctcctgacctcgtgatctacccccccttggcctcccaaagtgctgggattacaggcgtgagtcaccatgcccagcctccgataatactttttatttgccctggaagaaagtcacttaacttgctgcaacctgaatttgtttatcatgaaaatgatgctctcatatgtcaccactggtaaatgaagatgctttccattcttgggagatggtaactccatgaataccagactgtcctgaagcagggaacctggaaagtaggtgaagagagacttgagacgttcatctgattcttttaaaaaagcatagcttcattctccaatgaggaaaataaagggaagagagaaagtgcacttggacaaagaaatggagtggtatcagacacatctccaactttccctccaccctccagttcctctagcatcacccactcgctaacatcattagaaagagctgctaataattaattagaaaaggagaaaaaaaagagaagtgtcttgatgtttatttagttctttttggccagaagaaactacacaagtctcctgggatgtcactttttcacctctggtcatctctacattatgatttgatattctttggaagccaatactaagagcaaaccctcaagtatgacattggcagtcctagaccaccagctgtcactcctgccatacaccacacaacagtgatgtccacagaactgccctgattcttcctgcctcaaagacacagttatatgagttaacaggaccagatataaaattgtggcctctataaagacatgtgcacacgtatgtttattatggcattattcacaatagcaaagacttggaaccaacccaaatgtccatcagtgatagactggattaagaaaatgtggcacatatacaccatggaatactatgcagccataaaaaaggatgacttcatgtcctttgtagggacatggatgcagctggaaaccatcattctgagcaaactgtcacaaggacagaaaaccaaacactgcatgttctcactcataggtgggaattgaacaatgagaatacttggacacagggcagggaacatcacaccccagggcctgtcatggggtggggggcagggagagggatagcgtcaggagaaatacctaatgtaaatgacgagttaatgggtgcaacacaccaacatggcacatgtatacctatgtaacaaacctgcatattatgtacatataccctagaacttaaaagtataataaaaaatagagtgtggcctcttatccccatccccccatactcccttttttctatgtcactttcaaagcaacatcattcaatagtggtacagagtatagaatgttgtcagctttgaaaaacgcatatttcctcaaactgggaagtctttctccaagtccagaaagattatggagtaagtgtgttctgtccttgggaacataagccttagaaaacggagaagagtgaaggtcagggacctcttctgtggctgtacaagcctgttccagaaggagagacctaggatgattaaaatactgtttttgcagctgtcacacaaacactatttaaaattcccgttccctatcccaggatttaatgcaaattgtccacatgacagagggtcaaaatgacaatttacttgcaattagccagatgtgttggaatgaaatttctcccacccaccccccaaaattatctgaataatttacacatacataatcaccttactccagggggaaaatagtatgcctttatttatttccttcaagtacctagattttccaaccagaaagtgtcatgtccagaaaagcaaataagataactctgtgaggccaggctgtccctctttcaaatgcagacagaattaatttgtgttcattaactccttatcaagttacctgactttgattcccagcacaaaatgtattttaaaaaggagatgggggcagtggtagattttcaggaaatagcgagttctttttctactgagataaaaatcatttggcaagccagggtgaaatacttctagttttaagagagagaaaaagaaagagaaatgtagaagatgataatgaaccacaaaaggaaaagttttttgtttttttttttaaattttaaatcagaccttacttttgaaaacagctcagtttgcagcgaatttttaaagaaatgtcaattattcctttgggagtatgtcctagctaaaccaggccataggatgactgcaataaaggagtgagcaattcaggtgactttaattaaaaagcttaggctcatcagaactgacctttcagacccagcctttcatcccaaaaaggatgaagctggtaaaagctagtgatatgggcccgagggaggcggtcttggagccttggggaccaggctgcattgtgagctaactgtggctgactggacagcagattgctccttgggagggcagttggcttttataatgaggcatttgaagcaaagagggatgtcctataagttagtgagagaagatgaaaccctcagataactcctaagtttcacttggcatcttttaattgggaggctttagaaccccttggctccaaagtggccaccctcagtctgctccccaggattcagatgctgcgtgggaagagatggtcaacaagggctggggaagaggggacaggaagggaagctaacagccagggtgatcgccctgcagaggatcagctccatgcttggagctgttttcatgccaagagtagcaaggattcactgtgaagacaatccagatgtcaagactgagtacaaaactccctaagaaagcagccctgagtgtatggtgggaaaggccataaacccagcttctattgcagtgagaacaccggtccttgttagttgggatcaaggtaggacatttgaaggagaaatgtaggaatcatggggtctggagaaggagaaaggattgtgtagtcttactgcttgcatttattcaaatgcaagggggagctaccagccttccctcctccctgtctggaaaggattaacacatttgagggctctgagcactggaaaaaattactatcttcttcaccccgctgtctatctgcaaaatggtgattgtgaggctgttcctcaatatgctggtttttctccttccatgcacatgggggcaatgccactccccatctcctcaaagtcaggtatgccatgagatttgctttggccaagggaacattaacaagagaggagacactttcaggcagaagactaagagtcaatgcaaaccttcccatgctgcctcctctatgccactgaggccagggatattccagttggtggaaggtcttccatattgcttcccctgatgaggacaaagtggcacagagccaccttaccttaccctgtcatgccatactcttgctggctgacccatggtgtattagtctgttttcatagtgctgtaaagaattgcctgagactgggtaatttataaaggaaagaggtttaattgactcacagttcagcatggctggggagacctcaggaaacttacaatcatggtggaagacaaaaaagcagcaaggcaccttcttcacaaggtggtaggaaggagaagtgctcagcggcggggagggggaagagccccttataaaactattgatctcttgagaactcactattacaagaacagcatgggggaaaccacccccatgattcaattacctccacctggtctctcccttgacacatggggattatggggcttacaattcaagatgagatttgggtggggacacaaagcctaacaatatcacatggtgaatatgtagtataagcaaacaatccatcttggttattttcagccactgagattttgatgttgttttttactgaagatacaaaaatataaaatacctaaccaagaagtccaaaagatttcggtttcaaaaatgactactttgataatttggcatttccatgaataaccaaattcttttaaaaacttctctttttatgcttctggtatgatgtggtacattaagcatgcacctcacctggtctgactattgggaaatctaacccttctccccttagaaactctgccctgtggcaatgcacagcagaatacactgacttttgtagactatgtgagtatctcctctctgctgtcatttaccagccagtcacatgtttttggaaaatttattcaaactctctaaatttcagcttagttataaaaattagcaccataattcctatctttccaagttattgtgccccagggaggaaaagaagtacaccacatatagtggctttcccaacctactcctgaccaccagcagacacattactcaaccctcctgaggaagggtttcctttccataaaatgagatgacaatacctacctcccaacttggggtcaggattaaataaatcagtcaacatagagctcttagcaggtctacacaccgaatacacagcaggtgatgtaatcattgtgctcatcattaaattattaaattgcatagcacctaatatatattcaataaatcttagctgcttccattgcccttggagaatgagagcttcatgtttaggaatggaatcatttgaaatagcattatcaacagttaatcagcagggtggccaacaacctactatgaagaggaaaggactcaaggagtctctgctttagacccgtttatggtaagacatgtctggggctttaggatgccaggttttttccattctgtgaacacatggcttccattagtttactgatactgacatatccgaggcttccaaagaactctgggcctctgatgagtgaaaggtttgcatgcccaacaaggaaaagacaggctccacaggcataaaaatgctgccaggggaggggaagaggaggtgttgagtttaggtaggagaccaaatctggctctgtttttaatgaccatcctgtccacacctgaaaataaactagctacacctggggaaatttcgaatgcttctggagctccaatgccgatgtcagtgtgcatatatagccttcattaatcagagtgagtgtcatgtgggtgtgtgcaaacagggactggagaatagtgaacagtttgcacagtgcacacacaccgtctctgctgaactttctcatccaaagcaaacctaagctcgaatgatcagctccttttattatgtgttctaaggacatcgttatttggctggcttcttagaaacggcctgaattctaattagtttgcagtttgaggctgcagcatggtaactcaatacctgcctaaactttatcatctgtttcccatcttcaaagcggcatggtccacttttgtgctgagcaaaggtgatgccggggacctcattttgtgttttgtgtctcgtagcaacaagagctatttgaaagagggagaaaggtggggccatcgctgacctaagtttgggacaattctttgttctaagtttcatccccaaggggagggttccaaagaaataaggctttttgtccctgattacagaaaggatctatctcatcggggcagtctattatctctcaagatgtttgtcatttcagactatacagcaagagtgggcaaataaaagtgtgatgaaaaaataatgaggtcatatttgcctaatacgtgaaaactaacgtgttttcccgtacactaaatcatctggttgtttcaacagccctgtgaacaaggtgagcagttcgtattgggccatttttacgggtgaggaaagtaagactgaaggaggtcagcccaccttgatttgcatcttgtctcctgacaactaaactcttaaaccctggggaagtttctccatctctgtgtctgtatggcctcatctgcaaaatggggaaaacaacagttgctacttcctgggttgctgttaggcttaacgagttaatacatgtaaaaatttaaaaagtgattaaagatcacctgtgacaaagaaaaggtcgagcatgtgttggctattttgatgatgaagaaaagtattgggttggtacaaaagtaaccgtggttttgccattaccttttttttttgagacggagtctcgctctgtcacccaggctgaaatgcagtggcgtgatctcggctcactgcaacctccgcctcccaggttcaagtgattctcctgcctcagcctcccaagtagctggcactacaggcgcccgccaccacacccagctaattttttgtatttttagtagagacggcgtttcaccatgttagccaggatggtcttgatctcctgacctcgtgatctgcccacctcggtctctcaaagtgctgggattacaggcatgagccactgcacctggccactgttacttttaatggcaaatgtgattacttttgcaccaaccttataaagttgaaaatgtgggacctcagaagcttaggactgaaattatccataggaagaattgggctgagatgaaatccacatcagcatagcacagagaaaatgagaaaaacaaaatgcccttgttcatgtggctgttcaattcccatcctgtctacactccacactctaccctggatggatgacacactgctccaagtccctcagggtcataaggaagattgtgacccaatctgacatctggtcatggaaagctgtgtttccttcttattttataaaatgcatatgttggggcggggggaagaagaccaagtttgaccccctccaatccatgtaataatagctaacataaactgagcttttcttatgtgccaggcactgtgttatatatattgcacacattttctaatttctttctcatacagggtgacgaaacatatcagtttgctcaccactgatgggttccctggaactttgctgtattcgtgtgttctcatgctgctaataaagaaatacccaagactgggtaatttacaaagaaaaagaggtgtaatggactcacagttccacatggctggggaggtctcacaatcatggtggaaggcaaaacaggagcaaagtcacttctcacatggtggcaggcaagagagattgtgccggggaaatcccatttataaagccatcagatctcgtgagattttcactaccacaagaacagtatggggaaaaacacccccatgattcaatcatctccacctggccccacccttgacacgtggggatgattacaatttaaggtgagatttgggtggagacacagccaaaccatatcactggctataactgagtgtcctgggcaagctgggactgctggtcaccctccatgaggaaggtgctcaattccattttgcaaatgtaaagaactgaagtgggaggagtcccaagtctggacaggccagtagggatttttcaacctgtgcttttaaatcactataagatacaagctagggagagcatcttcctatgggagaaagttgtagcacatcagtgaatgggttaagttagctgttgctttctctttttttaaacttttaggttcaagggtacatatgcaggataggtaaacttgtgtcacagaagtctgatgtacagatcatttcatcacccaggtactaagcctagtactcagtagttattttttctgctcttctccctcctcccaccttccaccctctagtagatcccagtgtctgtttgtgttcatgagttctcctcatttttctcccacttgtaagtgataacatgcagtatttggttttctgttcctgtgttagtttaccaaggataatagcctccagttccatccatgttcccgcaaaaaacatgatcctgttcttttttatggttgtgcagcattcatggtgtatatgtaccacattttccttatccaatctgtcattgatcgatatttaggttgattccctatctttgctattgtgaatagtgctgcagtgggcaaaggaaatgaaatgaaacttttcaaatgaaatgaacagacatttttcaaaaaaaggtatacatgcagccaacaagcgtaacaaaaaaatgctcagcatcactgatcatgagataaatgcaaatctaaaccataatgagataccatctcacacaagtcaaaatggctattataaaaaactttaaaaaaaacagatgcttgcaggttgcagagaaaaaggaacacttacacattgttggcgggagtgtaaattagttcatccattgtggaaagcagtgtaatgattccccaaagagctaaaaacagaaccattcgacccaacaatcccattgctgggtatatactcaaaggaatagaaatcattctaccataaagacacatgtacacaaatgttcatggatgttgctttctttattacaaagggtttcatatcctcctggactgagtttctctgttgttgatgctgttggtgtttgtctgttctatggttgttatacttctgtaggatttggaggcataatctgaaatgttaaataacagacttttatttttctaactagtgtcattctatctttggaaggaaaaaaaaaaaaaaaagaagaacagtgacattagcattagcaactctgaaaggatcaagacctgatcttcatagtcctattattttttttctgtttccctctaaaaagaagtcttagctccagtaacttcctaggaattacaatttcagaagtgaccagggattctcaaagggcactttcttagcttccacataccttccaaatgtatatcaaggcttcacatcacctgttatactgcctctataaaacaggctcacagagtgggaagcatggcattgagtcgaccaaagaagtcatcatctcaagttataaggaagctcaggaagaaaggtttcacgtgaacaaagaattttccaatctcttaaataattgtccatgaatggatttacttaagcaagagcttaagtacacttcaaaagaaaccagtgattatagctgcaagatgaacattgcgtcaatagaagggccacttggggacactctgaaatcccagggcaaaactgactgtcttgatttgacagaggaatagggccaattgggggtttaggctgattctgttttttgtgagtcattttgtctgtggacatgccttacaaactaaaacaaatccaaaaaatccctaggtgtgagatgattaaagttttaaatctggtcatttgtaaatcacaaaagcgctggatgaaagccatgctgtttggaggcttttgtttttcttgttaaaatcttagggtttgctgagcttataaagactccttgaatcaaataaaaagtgagggcttttggagagagtcattctcttcagtatcagatgcattttagtctataattttccactctggcttatgtggctgtctaggcttgattccatcaactcatttaatctccaatttcataaaaaagcaagctttctgtttatctttgtccaactgagtgcaatctgtgctttctagctcttctaacaatcccaactttttgaatttcgtatcagaatgcctgtgtggcatggtaaatctaggctgtccttgacaggttggaaacggcatactcctggtgaggaaatcaagtgacggctcccaaagacactcacttaacaaatcataacctaaaaacagatcatcactttaatttactgtgatgaagtgggggagagaagttaatacaaatcaatgcatagctataagttttcaaaaaaataaatggtgcagtttcccccacaaacacttaattttcatatacaagctagttgctgaattagggaaaatttagcattcgacacaagctcatctgaaaccaaccaaaaacagaaacttgaactgaatttgcttattgctacatccctctattttgtaaagctgagaagactgcttatgcttcaaggaaagtttgataaacaaccatctgaccaacagaagcttgacattttagtatcattttaatatcatacctaatctgtatgtataggtcagagctggcctactgacccatacatacagatgagatgcctgagtaagacgattgtcttttgttactattcaaggtccttgctatgtgtattaggttggtgaaaaagtcattatggttttaaatataattttgggatgaatttataaagatgtattctacttcaatgtatgcattattacaccaaacagattcccaacattctatcaatcaatcattcttatggtcacaaacatttgcttcccaaaaatatttataaaattctgtttgtcagccccatcatatatattttggatctgtcctatcttactacctaggaaaccaaagcccaaaagaagtaccaattctctgtctacctacaaacacacacgtatacagcactaacttgcaaataagagtatgctgggaaagaaaagagagaaaggatagtctaccacatgtcatgaaacagacttgcttaatttcactctttatggggaataaagtgttaaaaataacccaaacagctgagatgagaggcaatacttttggttattcatttgtttttatttccaactcctcatctgttatacaactttggccttttaaaaatgaacttatttgtaaataagaataatgagttggcaactggattcaggtctggccattttacctgagtgatgaaaaaataaatgatgtagcggtctgcgaaaccatctgactcccctttgaaatcctcttgtttcctcctgagattgtctaattatagagtaatgctggaagtattcttcacttgcagattaattagttgatgcttaagtagttctttgaacataaaaggcaacatgtaaatctaagtgtaatcaatcatcctcaagctaatgatcatttaattagcgctttctgctagtttaacagtccataaagaagagggcaatttagggaagggtctcccaccattgcaaagaggtaagatgtagctataactagaatgaaaaacaatgttcaaaatgaaggttttaacattggaaataaattggaaattgactctcccttcttctggtgactaacagccatgagggaactgaaaatgaagcttatcttttagtagcatttgcatatttccagaattaggaatcacagtttaaattgggcttatctaatgttttgtggcaaaaccaaatacttgaggtgatatttacagggcagaaaaaaaagttaactctggagtgtttgtaaatattatgaaggcttaacttcctgcattcttggtaaaatggtttcctaactaggaagtcatgttcaagttgaaagttatatgataaagctagttgttttgtaaaatacttgtattagactttcttacatgattttctaattatttctgtattaattcccctatttgattatatacgcaaagccaggtgccttgcctatttccagccttattcagctaagagtcagcgttcattaagtgagtgtatcaatgaacaaataataactagaaatatacctacacaattaacatgagaaaatgtggctttgggtataaaaattattcttctaacttaaaacatattacgtcaaagaaaatgtaaacagttctgtttgtcaattaagtccccactctaatgctgggccgttaacacaaacatcatcacaaagagatcatccagccaacacgctcaagttacccagcactgcaaggagccgtactggtttatctaatcaatacctgcatcacatgactttttaaagtcacagttttctcaactatgaattggggcaattgcaacagttaaatggaatgatcacaaaaccaaagtaattatttaataggtgtcagcattattaacatcagttgatttttctttttacataattttaactcaacagagaaaaaaatttaaaaccttgctgaaaatacgtgtagccctaccctgcatggacaagaatttgctttgccaactgataattcaagtagcacaaaagcaacgttagagatcagcactgacacctcatgttagtaagaggcacacacctcaaacctaagctttcagggatgttgtaaaattcatcatttaaaaagagatttttaaaaaggcaatagcagttatgaagatatatatcacattagctttttctcaaaagaaaaaaaaagatgcaaagaatttaactgtgaaataaatagtataattagggtaatagtaatactatttaaaattttattcaaaaaaagaaacacttcaacaatagtagtagatgagtgtctcaaagtactcagacgtctaccctgtttttcagaagcatgtttttcatgttcctatcagaactcatggaagaatttctacatgcaatttcttcaaaaaaatctccacatctaaatctgacaagacagaagttttgggcaatccttaccaaataggctggtcatacagcagcacgcatttgactgtattccaaaacatgtgtcttaaaaggctctactgaaatggtccctgcagaagatgaatgcacagaatctatattagacccacaggtaaagctttggatgcaaaaaccacattcaccctacagtcttttgacaaaggtttttcgtgacttagcctctgacttctcttacttcttgagcggatttaataccatcgacttctacagtgtataaataatcttggtctatgcacccaaagttatgtaagacagtagaaaagaacctacctcaatttgagtaaaacatcagtttttagaaaatcatgaatctgtgtaaagcaaggcaggagaaaagcagatattgctaataccaatagattaaaacttacactaagaaaaaaagccaccactttgtaaatattatattggataaatctgaagtggtgtctaacactattccttggctccttttctgaatatgaatgctttctgcattttcttaaaattatgagaatttttgaaaactccaaaaacagaacaaaatttttatcattgctgatttattctcaagctttccctcttctaagaaaacaaaagaggaaaaataaaaacaatatataacaaataaacaaacctaagccatagatgctgaattctgctacagttatcattttgtagaaggatgagtaaaacaagataaaacacgtgagtgttcatttacagaagttacaagctttatgaaatgcaaaggagctgtattttaccacaggaagccaagtgaaatagggtgaaacagaagtcgatcatattcaaataattaaaatacaaatacatttcatgaagactctgattccagacctctgctctcactgtcttccacccccttttattggaatctctgaaaccattttgcttggggcagaaagtagattttagtatagtaggaaaaatgccaaacatccatggcaacttagaatttttccactttctttacatgttcaattgagaccttcataaaattataaatgaaaggatacattatgagcactttctttgaaggggaaaaagagggtggggggaggccttgcctggaagtaaaattttggagtctatatccttcttctctgcagaactcttgggagctttctctgccaacagcaggacccctaaaaaaagcttgcctttgccttcagaattcaaaaaagtagaaccaccagttgctcccctgaccgtgggtgagacgttgatcactaggtggggactggaaagtcctgggctccactttcttgtccctcaaggactgaggtcagtgtgtcttggcgccttatatccactctctccatcctcccgcattccctccccctcaaccagggattcactcctgtttacactggggagactgtaacttctgtttcttaacgtttaaaagaagtttaaaagcttataaaaaggctcttaagatttcttggacaccaatcacttcttacagaacaatattttgatgagttaagtgtaaatgaatcagaaacctatgtattaaatttcccttgacatgaacatcaatttaaaatattaatggaaaaaatgcccagggctcgaagtgttgggggttttctcaaacccaaaatgcttgaacgtggagtggaaatccattcagatcaaccagatttgctgatcctccctctcaacctcccctagattgtaattaccgtggagggagtagtatttccagctattgaccatctggctggggatagatcacattcctggtcattatgcttgcatctcagcagaagcccaaggctgggctgaggctgttgagatgtccagccgctgttcacagaaggctgaccctaaaagctgcctttttttttttttttttgaccaaggaaactaaataaacaatcacagaagatcataaatcactgacaaagatatttagatttgcaacagccctcaaaaacagaatgtgccacaatttatccctcaaagattaactcaatcctgggtcctataattgtgcatcccatgacttctgatgataaatgacacaagggtcaaaacttgagaattggtaggtgtttttgttttgttttgttttaaatattgactctgggtccaagaaaacacccagaggaacagaagcaacccaaaatcctgaaatcagacttgttccctaaaatcatcactctctctatatatatttatgtatatttttaatatataatacatatgtattttatatattatatataaaatatataaaatatatattttatatattatgtatatatttttatatatattatatatacatttttttttttttttggagacagagtctcactctgttgcccaggctggagtgcagtggtgcaatcttggctcactgcaacctctgcctcctgtgttcaagcgatacttctgcctcagcctccccagtagctgagactacaggcacccaccaccacgcccagctgattttttgtatttttagtcgagacgggttttcaccgtgttagccaggatggtctccatctcctgacctcgtgatctgcctgcctcgacctcccaaagtgctaggtttacaggcgtgagtcaccgtgcccagccctgtttttttaagttggtttttcatctctgttttgttttgtgaacggatgaccacacacactaggttgagtgacaaaataaggagatggaaccaagcgaaagagatgtcaagcctctcctctttggtcacgttagctaatctgaacatttgggacctgtgtcacagatactacaactatgaacaattgctaacttcttggtgaaacacagcatgtgtccagcgcttcaaaagtattattgggagcatgtctgcctaatcttcaacccaacactcattctagtaacacacatgaaagggttctgtgaactctcataaactatccccacataaactgtttttactattattttcaaaagtcatatccctcacccgcttaaggacagcttaacagttctcagtgctttagaagatgcccttattcatctctatctcaggaggggtgaggacccaagagttcccttctaatgggatattttcccttgctcattccttctcagagacactctctcaaaggtttggcagggtctggtggtcagggaagagtgcatctttacagaaacataccttttaaaaacagtgttcagccttgtcctactcaaggcacatgctggatatatgtttgttgaatggctaagtcaatgagtgaaagaatgaaaaagccatacctcttttacaataaatttgcatagacgaatgaaaaattaaaagactgtcagagacaggtacagcacaaattgcccccacctcaactagccatcccttcaactccaacccctcccaccacagaagatgattagggttttttaggaaaaaaagagaagctgtacagcaatgacacaccccaaagacagcacactaagattcctttgctttatattgtttataatgtttaacctctctggtggccaccagttcttaaaagctcctaagcattttcacagaaaatataagaggaaaaccagcaatagtaacaacgtcaatggtgccggcagacacagaaagactcagaaaaatatggaggctctaggatgcctgataacaagtctcatttcctaaaatgagatctggggactggagaaagtgttatcaaccaagacaaggaataggatagacatcagaagtgcccaattccaacacattttctgagactcctttcctaggcaaacctgatgaatgtgcagacataaatagatagtcctaccataaattgatctctttttatcctaagtaatcaaggtccagtcatttccctcaagctgggcttctattgctctctctggagattcagcataaacatgtccttgaagttttgctcaggtagatgaaggtggcagaaagcatgcagctactggggttagtggctgtcccctgattaagtgcaaaggtggagacccatagtttatccccagaaagtttccatgctttcccctggcattttctctcaagcttttacaagccttgttcagggagtggaaactcattttaaaggtagtttagacccacccttcccttaagggaaatttctatgcagggggaaagcaagcaaaacaaaacaaaagttacacttcaaagccttacaagataaccacagggagaaggctaagtcctcccagttactcagccctcccctgtgctaattgcaggaggtagagcctgactgtattattatttgcatacttgatcagaagaagggccacagaaggaggtctagaagctcagctggtgtttgactgacatcttttaggacttggaccccaccgcccacccccgcaaccaacaccaccaccagtccaggacctgatgtaatattgccacagactgattcccgttgcctttgatatgcaacctgtgcctacagtcagctctcagggctaaagaaaacagtcagctcctgcggcatctgatttgcctcctgccctcgctgctgttaatctgcaacacgccacagcctctagatcgctgccgttcagagtcggatgtcatgggggcgactggcaggggttctttcttctttcggtttgatacatccttccttccgctgctcctcgcaatcaaccgctaggggaaggagggaagcaggcaggagggagagcgggagacttccggaaatccctttcctcccttcccttcacaggttgccccatagtgaccctggagactcccgcctgcccccagtgaaggaattggttactctcccagagccctcccgggcatcgcccccttcctcacttcctcctcttcctgcccccagcctctacccctccagcctcctgtggcttcacaggcaagtgccgcatcccaggaagaaggagttggagctccgtgatggtgagctttcagacttccccctacaacctccgcctccccaaaggcacagaggcaagcagtggcttccctggtatcatttgtggatctaggagcatgagggagctatcgaagacggcatgtagcctgttcttctttctcttagtaaacaataatatctaaatgtgctagagggaaaatactttttaatttatactttaaaactggtttagattttgaatgtatagtctgttttcctggagtccaattgtaacatgaaccccaaacctaggagttctgtttttatacatcaggaaggggaccaacccactcacccatccacccatctttcaactcacccacccactcttgtttataactgcatagtggtttattttgccagcactaaactatgcagcttgtttcccctttgccagcctctgcagacagaaagcaaaggctgatcattctcaattgacatgtgcacccctactctgaagctacagctggatgacacctcagacaaatgcactcatacataaaagtttttctgcatgttttcgtttttgattcttttattggaagcatttttatggctgggaggtaggtgcacatccattacagtgaggggtcagatattagaatacttacggtgcttataattttaataggatcacccccctcatccctcattgccaatcaatttcactctgtttcagggtcacagatcatacccctaatcctggccagttgtctcaccaatgtgtgtcacaagcggcctggggcaagaaagtatagatgacccagcataaccgttgcttctattgcaaagggtacatcctacaaagagcagaacacgattagaggcaggcataattgcaggcactaaattagcatgggtctctcagccaggggctaatctaagccagacctcacgtcatggcaggccatgagtacatcgcaattacaattcaaaagaaaagagaaaaatcacccttgattctcaaatgtttatttttaacacggcagatacttagcaattatatcagaggctgaggcatctggagtaagcaagaaaggtgatttgggttaataatctttgaaaggctaaaggattttcaatgtatgtataagactgagccctgtgcatgctccccattctctccctgacatcagccacatccaccccacctctgccgctacacgttggtgctacccaaggtctccattcacgcactgtccctctgcatctcatgcttcatccgggccctcctctgacctgaccttacctggctgacttagtgccccaattctctaaaacatggagagatggaactggtagcttgaaccctcccagttccatctcttccctttgtaagttttcccggtgcccttgggccccatgtttctagactatgccctaacacagagcctttaaagcttacttccacatgaaggcagaaatcaatcttgggcagccaaaacacatatgctttctcagtggtaggcttaggagtgattttttttctctacaatcaacatgtattaattttacattcaaaaattgtgtgtgcgtctgtgtttattcggtttcaaaatccagtatacaacaaactttgcttctcctggctttttaaactcttttcacatgccatagtcctggttcaccagtgcaattaatttgcctttgaatttgccactgggattctttttggtcggcggggggctgtaggtcggggtcagagtcttgctctgtcacccaggctggagtgcagtggcatgatcatagctcactgtagcctcaaactctcaagttcaagcaatcctcccacctcagcctcctgagtggctgaaattacaggcacaagctaccatgcctaactaagtttttaatttttttgtattgacagggtcttgctatgttgcccaggctggtctcaaacttgtggcctcaagtgttcctcctgcctcagcctcccaaagcactgagattaccctgcgtttttgtttttgtttgcttttttattaatcaaagtagaaatcacagacccattgtatttctacaggtgaaatcattacaatgttgccagggattaatttctatgagtggatgagaggtctctttttcacagttttctttttgtcaggggactactgccctgataaaacttaggccttccctggctaggacatagtaacccttccagccatattataatgaattttgtaaaacttggccaaacattaggctgtactggaatgttacctttttaaatttcagaataaataggctatcagcaggatcacggacaagttttgatcatacagagacagccattgtaataggactttttctgtgttaatataatgatttaataaagccatttggcacataaataagactctcttagaccaagcattcttaacaatgagagaattgagatcagcctatagggtgtattagcaaaagtgtcttttccagctttagtaaaactcttccatctgtttagcaataattttattattctgtattaaaaaccctcctgaaatagatgtggtaaaaaacgctctgcccctgttatgatactttccaaacaagcttaaaattgctcagaaacaaaaggcaggagaaaaaagaaagggcagtgtctccagataatgaagttctgcctttgtgttttatctgtaaaacagtacggtttgaaaagtctggatcccatttcatctgaacgcaacataaatgtagtgcctggaatcctcccaaatgaataaattcttttctgataatttttaagtgaggaaagatcaacaggataggggcatgaggtggggggcggggtaggggggattataggctggtgtgtgtgtgtgtgtgtgtgtgtgtgtgtgtatttagcaggacaattgggagagttctggacataatttttttcttttctttttctttttggtgaaccatgctgaattttgtctctctttcttgaaaaaccttaatagatttgtgtgtttgttgaccaagtgctctttttcattcctattcagcttgcctgtcccatcccaagtatacttgcctcagatggcaacatgacaaagctcccttccttctctcgaatggtttgcaagcttctggtcttctttttcttctccctggattgtgcacaaaattatgccaatttatggtggggtaaggggatactccatggaccacttatctctttaattttcctccatgttgtgaggtcttgctgagcgcagtctgcaacttctggagtgatgaagagaacaaaaagctgtaggcctgtcacactaactttcaggattgaggttaccaaagaggaactgtgtaatttctttatataaatggcttaaccagacctcaaaaagtcctgcaatgaacacagttctctttcgggcttaatgttctcactttgcttctttgtttaaaaaaaaaaaaaaaaaaaaaggttggggggaggaaaaaaggccattgatcctcctcttcctttgaccactggaagaaaggtagagaaaaagaaaaagaaaattaacaaagaaaggacccatgtccctcctgcttccccctcctctccccatccacaggcaaaatctaataacaatgattaaattacatgtcttttcctcccattgaaatccactgcatactattcaaatattagaactcaggaaataaggcaggacaaggtccctcatgaaaccttagaaggcagcacaggggtttgagctggaggtctgcttggctgggcagctctaattaagaaatcaccctgctgagcagaacttaatctaaataaaatataaaaaggaatccagtgaaaaccattacctccccaccccacctcctcacacacctcacatccataggccctgtttccctagtcctaggaactctccctcccatcacctgggagttcgatgttgttctatgtgccccacagtacaatcaaaagtgaattctcagctctagaagaggaagctatgtcttgtgctggcctcttgctgtttggctggcctttcacagggccagaggcagatttagtcaatgttgttttggtttggaggggtatatgaaatggagatttgaccaaggaatgattaaagagctggttatttgctatagttaacaaggtattgtgtatttcaaaatacctagaagagaggacctgagatgttccacacatagaaatgataaagactaatggttatggacacttcaaatactccgatgtgaccattacacagtctatgcatgtaacgaaatataatagctaccccataaataagtacaaatatttggatcaatttttaaaaagcaaagattaaaaaaaagagttgaccatctggtcagcccttctattcttaacacaatgaactgccaacccacagcctctctgcaggctaactgggttcttcttgcctgtccaccaactgcatttgatggagtagccacctgagagcaaagtccacatctgtttaacttgatgttgttcactatacttgtactaattagtcctttatgctgtattgaatcagcctcagacctctgccccaccccccgtcctgggtgctccctctgatgttgggtgacatttatttagcttcatttcccactgtcctccatagaaatctgttctgtgttctcattgatctcactgttgaccccatgagtgtgctgttctctacattacacctttgtgactttgcatgggctgccatgtccgcccatggtagtggtttttaagctgttgaaaacctgttgaaagagataaactctatccctaaggtgggaaaagcacacatatgtacataaacacagggttttgccagcaatttcagggagtagctcactctctaaggagtatgtgattaccaccttgacccatttatgcctgaggttgcaatttttgcaatcagatcttggtgatgatcttgagcagtaggatataaataactcccacatgcttagcattccaataatggaacactaggcgtaagtgggtcaaactcttgagatcaatttttctgtcttttctcctcccattttgggaaaactcctacttatcctcaaggagagctccacaaagtttgcagactcctgctctgtgctccttgatgtcttttgtctgtaaggccagtacaccacttaccacagtgcaataatcatttgtttgagtgtccatcttcctctagaccaaagggggcaaatgttctcttaaaagtgccagatagtaaagatttttaggctttgtaggtcatatggtctctgtggcaactactcatgtctgctgtttttgcaaaagcaaccatagatgatgtcttagtctgtttgggctgctattaaacaatactgtgacctgagtggcttatatacaacagacatttatttctcacagttctggaagctgagaagtctaaggtcaagactccagtggattacgcatctggcgagagcctacttcctggtttgtaggtggtgtcttctctctgtgtcctcacatggcataagggaaaagggacccctctgggatctatttttataagggtactaatcccctgcatgagggctcctgcctcaagacctaatgtattgtccattttcatgctgctgataaagacatacctgagactgggcaatctacaaaagaaagaagtttaatggacttacaggttcacgtagctggggaagcctcacaatcatggcagaaggcaaggagaagcaagttacatcttacatgggcagcagcaggtaaagagggagagcttgtgcagggaaactcccatttttaaaaccatcgtctcgcatgagacttactcactatcacgagaacagcacgggaaagacctgcccccatgattcaattacctcccaccaggtccctcccacaacacatgggaattcaagataagatttggatggagacacagcaaaacaatatcacctaatcacctcccaaaggccctacctccaaataccatcgcagtggggattagatttgaagataagaattctgggaggacacagacattcagtctacaggggacaatatggaaacaaatgggcatggctccattccagtaacactttatatgcactgcaatttaaatttcatatcgttttcatgtcataaaatattttttatttgttttccaaacgttaaaaaacataaaaactatctttttttttttttaatctcattagccattcaaaaacagatgagatggggacagatttaacccaaaggacatagttcaactcctggtcttgacagaggagaagccctcaaaggtaaatcttactaatttttgagctttattatctaatccctcaaaggtaattcatccttgagtttaactatctagcattaactgatacaaaaaatgcatataaatgtacaatttacccttgaacaagaaagataggttgacctgtgcaggtccacttacacttggattttcttctgcttctgctactcttgagacagcaagaccaacccctcctcttcctcttcctcctcagcctactcaatgtgaagacaataaggatgaagaccattaatgatgttctgcttccacttaatgaataataaatatattttctcttctttatgattttcttaataacatttctcaagtctattgtaagaatacagtgtataatacatataatgtacaaaacttgtataatcaactgtttctgttaccaataagacagtagcctattagtagttaagtttttggggggtcaaaagttacatgccaatttttgactgcatggggtgttggggcccctagtccctgcattgtttaagggtcaactgtaataacaactataaacaactgaatgactttttgattacaaaaaattccttgagacaaagcctgaatagaacaaccataaatgtggctttggggacactgttgcggcttcatgtttcatcatgactagagatataataccttaagtagttagccaccaacactccaatcgcaaattctggaggtctgggattattccacaaatcactgggtagatgcaaaccttctagagaagtctagtatcagcagagtaaaacaatctccttttaaaaataagatttctttatcactccctgctttcacgcaatcacagcttctttttatttacttatttattttttagatggagtctcactctgttgccaggctagaatacaatggcacgaacttggctcactgcaacctccgcctcctgggttcaagagattctcctgcctcagcgtcctgagttgctgggactacgggcacacaccatcatgcccagctaatttttgtatttttagtagagacagggtttcaccatgttgaccaggatggtctcgatctcttgacctcgtgatctgcccacgtcggcctcccaaagtcctgggattacaggcatgagccagtgcgcctagcaaacgacagctttttgagcctctgtttaacaatctcttaaaccttataggtaggcagttctgagacagctcctaatcatctcccctcctggtattcaagccctgatggaatactctcttcttcaatgtgagctggacttagtggttttcttctaatccattgaatacacacaagtgatgagctgtcatttccaaaattagttcacacaaagctgtaacttttgttttgttcacagcctctctcaattgccttctcagcttgtatgctttgaagaagcaagctgcagtgttggagaggcccatgtggcaaggaaatgagggtggcctccagtcaatggctggtgagaaactgagaccttccttccaacaattgtcaagtaactgaatactcccaacaatcatatgggttaggttagaagtgaacctttctctagttgaggtttcagataagaccacagatattatactaacaccttgattgcaggcttatgagaaaccttgaaatgagaagactaagtaaaaccatatctggattcctgacttgcagaaactgtgtgatgataaatgtgtgttatcttaagccacaaagtttttggggtgatttgttctacagcaattgataatgaatacttcaacctatagtgacaactggatgtctatttactcattttccccaccaaagtgtaaagttcctacaaggcagaggttacaacatattcatcctgctacctctcacagcccataatatacaacctgacccataaaacatgattaatcaatgtttgttaaattaacatgtattttgagtttcattgaaatcagttagttgaagtgataataacatttaaatgtgcatgagcagtaggacaaggcagatagctggttaggatagaaagtttttgaaaattgtgaggggaaaaattatttctatttgtaccctgttgtacccagcttaggtttcaaaaactttcagggggtttttattcatttaccaaagacttcaaagttggtgcctccccaccactctaaagaggtctttgcccttattgacccaaccatactgatttgcctggtgcacagtgggagctattataaggagaggggagaagaaggaaatagaaacaactgtgaaaaaggttgaaaaaaatagcgaaaaggatagaaaaagagcagaggaaagagaagaagtagtcaacatccaacccagatgcagagaaatgattcaaaagaaaaagtctgattttcctgtcggaaatatttttaaaaggaggtaggcatttatcaaaaaggaaaaaaaaaaaaaaagaataacagagtttgtcttccaaaggacccaatactcttggaattcaatgacctaattctgtgtatggttgcagtgtggagattgcctcttgtctgattctcatggcattgagacctctgatttctcaacagcacatgccacagcactatcagaagtcaggaataaagaacagagggtgtggggggcagtctagatattatgctcagcaaacatatttttaaatcagtgtaaattctatcttgctggttgcttatcttagcagttaaatcaacttttcgttacttttgtagacattatataatatcttctccccgcagctccagccaccagctgttagtcagcagaatgggagagggactgggtcagcttaagctgaataacttccatggtgacatttgagggaaccaattcccagccactgaacaaacctaaatgttctgctatggccatagaaccaaatagatcttaacaaagaaacctgagagcattcaaaggtcaaaacaattggagctagttccttcaagcttaaatatgctcatctgtaaagtggggacaataactgtgtgtcttatagggttattttgaaggctaaatatgtgtaaaagcctcagtctactgaaaggttgctcaactgtaacactcttttcattttgtgagggatcattctttgttggaggttagggacactgtctcgtgcattacaggatgtttagcaacatcctcagcttctatccatcagatgttagcaccccccccacggaccaccatcttctccatcatcaccatcaaatatgtctccagacatttccaagtgtcccctgggaggctaaaactgcccctggttgagaaccactgttctagtacttggcattgttccataaacatcagatgatatttttatcattataattattactaaaggcaacatcaccctgctatggagacaggtccttggtctcacggaatccctgcaatagttgctgcatttctgcatctttctgagagtaagggttgaaaagagataaggtcaattcatctgacaacaatccaatgggaaacctactgtctccgtagaaattcttttcatggaaagaaaaggggctaccattttgatctgctgcaggaactaggtctattcctcagcctcacagtttgcaaaacgctacagacttttccatgggcataaattctccagctttagggattgctggtatagttgactcttgaagctgctcttggatttccaagggtagcaccatttttacctgagaaaagaaggaaaaagatattcaagaaggagaacttttcaacagaagttactccatttgctgtttttgtggttttgtgcttgtttaggtttgcaagtgtgttttctgcccaaattgttcttgcatattctaacagtgtttgctttacgtgttttgatgccacgctgttttgaaggtacaaatgtttttcatggcatgtcttgtgttaagtgtacaaactgagacgtgaatgtcagtgactgaatagagtacagtattcctcaaagtttgtaactaaataaaccctaagagaaaagtgaagcgagatttctggaggtctggaagtggccagctgacaatatacatctctgtatctcctatttttatctttatgctaaatgcaaattttactttctgtgctaaaataatgtttcattagtttcaaggtaaaaatgtgtaaatagactttccgtactggcttgtttattctgtggtttttcctactccctttttaaaagtatgtacagtgaatttgcaaagatcatagtattggaatctaacccacctgaatttcagtccttggctatactactgatagaatggattaacttgggcatatcacttaatcctgaggaccctcagtttccatatccgaaatgaagaagtaagaagtgacctactatatcacaccattataagaagtaaaagcaatatatgtgaacagtagagcagagggccaggcacagaaagttctctatagtcattagctggcataattattataaaagggagcacttttgatgtaaaacataggtagaagttcacaaatttgttaatctgcccctacctcccaaccgtctacctaccctccatacctggccacctgcctcatacagatattgcctaacttttaaaaaggaacacttttgatataaaacataggtagagggtcacgcagtacatgaatgagaaatgaaacagaggcctgttaatctactgtcacctcccaaccctctacccaccccctatacctggccacctgcctctgtgcagatcttgcctaacctttcccaacaggaagaacctgggattttgtgaaatacttccgaggatgaaactaacacagctcattaaccctcccaagtatctgtgctataaggatttcctgtaactttcccatgactctgaattacatctaccctgagccccacatcaagatctgggacattgccttgtcatgctgacagttgcccacatttcctggctttgttcacattgcttcccagacccctcttctgaagattctgattttcttggtgtagggagaggggcagataacttatatttttaacaagctccctaagtatttcctaagattgtgtaagttgagaaagcactgcattgtgctatctgcttctgttgcccacagtaccagaacatatctccagacatctaaaacactaaaacaaagaacagcaggtgtaatttctaaaaaaaaaaaaaaaaaaaaaaacctgatcatggcaaatttaatattagtctaaatatctatcagaattccaacatacaccctccttgaccctgcaattctacttcaaggaattaatcttaacaaatatacttccagatctatagaaaggtgaatgtaaaagcattgtctctaatgctgtgcggaataatgcagaagactgtgagaaaaaacctaatgtccaacaatgggggaagaaatgtatgacatagccatataatagaatattatggagctttacaaagacagctgtctgtgtttcggtattttacatccatacaagccattctctgtgtgttgaattaaattaaaaaggtctccaagttatattttaaattaaaaatgtcaaagtgcctaatagtatgggcagttgacaatctatctccttcctctctataacctttctaactagattgtatgtgtcttgtgcattataagatgtttagcaacatccttagcttctgtccaccagatgttagcaccccacccacagaccaccaccctctccatcatcaccatcagaaagtctccagacatttccaagtgttccctggagggtaaaatcacccctgtttgggaaccactgttctagtgcttgaataaacgcacatactatccctggaaggatacccagaagcatcactggtgcctgtggggtaggggactggatggctaggagctaaggccaggaggggactgaatttttgcacaatatgttttcttggaccctttgatttttgtatcatgcacagatttaacctatacaaaagtttgttttgatttaaaacagaagacctcagtctagctagcactcataccctacatttattccttccctttatccttctctttccttaccccacagctttgctcctccattcacattaggagaatcttttcctgtcctccattcccaccacagtgtggacttcctctctccctatttccactctgcttaagccccaccatttcctggaggtatgtctgtcaccttcaagttctactaaagctaccttgaatctaagccacacaggagggtttgttgccctgatgaaatacactccatgaccatacccttcctgtacatctacacattcctcatcaattggagatcttatcacagagaaatgttttaaaaatcattcactttagtgtcaaactttcttctctcttattttaaattttcataatttttaatgtatgggtgcctaaaaaagagtgatgtctgtttgaatttgacctgtgtgtttgcatttcaaccataaatttcctcgtaaacaacagactccctatttatcctacacaataacaatataagaaagacctacttataatctctcctatcggcctaattataagctcttagaagtgcggagcttatctttcaccattctactttcttcttagggcttaatgcagaagtttgacattaaagaccctcaagaagtacttgttgagtgaatatcagaatgaagtagtgaatgtactttttttaattttaattttaagttcaggggtacatgtgcaggatgtgcaggtttgttacataggtaaacgtgtgccgtggtggtttgctgcacctatcaacccatcacctaggtattaagcccagcatgcattaactatttttcctaatgctctccctccccatttgacccagcaatcccattactgggaatacacccaaaagaagacaaatcattctattacaaagatacatggatgtgtatgttcattgcagcactattcacaatagcaaagacgtggaatcaacccaactgtccatcagtgatagactggataaagagaatgtggtacatatacacgattgaatgctatgaagccataaacaggaacgagatcatgtcctttgcaggcacatggatggagctggaagccattatcctcagcaaactagggcatctgcaggaaaacagtgtactattctaattcatttccaggagtgttaattgattgttttggcagaagaatgtatggtttgcgatacagtgtcagtaccatggttgtacagtctgtttgttgcctgacagttgttggcttgtttttagtatggtcatttagtctcccttgtttacccttgaccccatctatgtccttcagagcaccaagcatagggatttgtccacagcacgttcttgggaaatggtatggaatgaatggcctttgatgagcaatataaagaacatgtagaaagcttggcaaaagcttaagcagtaaaagtaaacaaccaacttgcccccaaatctgcataatgttatattaaatgttcatcatgggaggaagaatgacaggcaggtttggggggttggccatctctccatactttccaggaagctgggtttatgtcttctgaggtaagaactagaatagaattttttttctagatatttgtgctttgctcactcctgtcttccagggagggagagggtctgcctattacaagaaggctgtgatcctttgggctgtcaagaacttaatttaaaatcataactgatattaataacaggtatttcacttatacatgctcttgggactctccaaatgaaggctagcccatagtcaccacagtcagggagggtaacattcatggagggcaagggattaggatcaccctgaggaccaaacaatcaataaaaccgtgattatgattttacctggattgagtcaaacatcagggactctaagcactttcccaatgctcactttccaccagtaagttagcaacacttaacgtgcacacactgggcattacctctgcaggaacaaaagctcatatggagcatttcacattcttaatagaagagtttgcctttgacatctcagtgaccagtgtgagtcaatttggagaccacattgaaccatctctatcttctggtcagttgaggatgtaagaggtcctccagtcaacagaacccattcagacatgacagaaagacaacagctttgggttgaggcatttttcacttgatgtcaccgtattagtctgttctcacgctgctataaagaactacctgaaactggataatttataaagagcagaggtttacctggctcatggttccacaggctgtacaggaatcctggctggggaggcctcaggaaacttacaatcatgatggaaggtgaaagggaagcaggcacaatcttcacatggcacagcaggagagagggagtgaaaagggaagtgatatacacttttaaaacaaccagatcttgtgagaacacactcactatcacaagaacagcaagggaaaagtctgcccccgtaatccaatcacctctcactggatccctctcccaacgttacaattcaacatgagatttgggtggagacccagagccaaaccatatcagtcattaaaaagtaatgaaattatattacctgtatctgaatagaactcagttgctaatatgtgataaatgaccaaaataaaaatcttcaagtggacccatcacctctgggtatgacctatttttccagactaaagctgcaactagatggaaaaatgcatgctcaagattaaagttctgctattttggagcctttgtgtaaaggaagacactgcacaggaggtcttccaggctgaccttgtctggtgaccatagtcaagctactgaagatggcatctgtacagcagatccaatgacacctaccacacagagttgttgtgaatgcaggttgatagacataaggtacacagcattacgtgactgtcgagtgcctagtacacagtaggcacttaacaaatgtttgacccacgggaaagaccaatacccaactacacacccaacttcagacccacaggaggacttgatttccactataggctgtaatgacacagtgctaaccaagaggttaggactgcaggaggccaagaggggacattcctgcaaagccaatctacagctcagggaaggttctgaattaaatcctcaccatgcaggtctaagtgacacggggaatattccctgtgggactttagataactatcatttgcctgctgcataattctctgtactgaagttgcttccttcccttataataactgtccgctagttagctcatggccagcaggctgaagcacagaaggtggctggtgtcagcctcctgagctgccaagtggagatatttttctcaggtttctgggtgagtttttaagccaacacccttgaaagggaagcagagccttcgtaccacaggcatccgggacacaaggcctacacagtatttttgaaaagtcattatcgctcactgacgataaaggggcattcacagtgggcaaagccactccacgggaatgggtggagctggggctaccaggcaggctgcggaccaagtttgcagccagttttccttttccagcatctctggagttgagcaggtgccaacacagctaacagctttaggaggcccccatggacacagatagcaagccccccatcttttccatggaatctagcagcagctaccaggggcgtcagcacactgcattaattttttcccttgcctggtttcccacattctgtgaccaacttagcgtgtgccagggaaaatattgaaagcctaggtaaacgaaggggaacctaacattcaccagtctggccttaaaatagccagtggaacgcccccatcccagagagtacacaggcagtgactgcagctagtgtgctcagagcagctgcccaccccaccccaacggctcatccgattcccatgaaagcctatctcagagagagaacaaagaagcagccaggctcctttgctgccttattccctttgggttcagggatgtaggtgaatattaatgaataccaagtgacctgatgcaaatcagtgcaagccactggactggacggggtgggaaccctggtaaaatatgtctggggtggcgtataggttgagcagagcaaatggagagagccaagaggaagagtgttcccgcagaagcatcaaggcctcgggcgttacagggcacaccccagggctgagctcccagggagaagggaaaatgttttcacactgactgctgggcagcctggtacatagctctagaacctactgctgtgtcccaagtttgcatatcttggaaggagtgcacacagcagggagaggggcccaatagcaagaggtacagaagaaggaaaggagaacagagagaagatcatctggggtcgaggaaaaggaaaagtgtatagcttataagctttattttccccataaaatcttgcctgattgagcacataaacatgcaggatacccagtgaaatctgaatttcagattaacaacacatatggttttcaggataagtatgccccaggcaatatctgagacatacttagactcaagaaaaaaaaaatcagtgtctatccagaattcaagtgtaactgggtgttctgtattttataggcaatcctatccccacatcttgccccccgggctataatggaaaccctcaaaggctgagactgtttctgccatgtccttcctgcattccatgtgccactttgctctgtaatgtagcacagaaaggcatcatagcaaggataagtgtgaaagctcagcaatctgactgtcctgacttcacctgttattagccctgtgatcttggacaagtaacttagtcactgtttcctaaatttcctcatgtgctaaatggggataatgatagttgcctgacttaaagagtggttataagaacacaatacatgggggctgggcgcggtggctcacgcctgtaatcccagcacttcgggaggccgaggcgggtggatcatgaggtcaggagttcaagaccagcctggtcaagaaaccctgtttctactaaaaatacaaaattagctgggcgcagtggcaggtgcttgtaatcccagctactcgggaggctgaggcagaagaattgcttgaacccgggaggtggagtttgcagtgagctgagattgcaccgctgcactccagcctaggtgacagagtgagactctgtcaaaaaaaaaaaaaaaaaagaaagaaagaaagaaaacaatacatggaaagcatttatcgtatcataggttcatggaaagtactcagtaagtgccagccattaatcactactgttgttattattattatttgatactcggtaaataaaggagtctgatagagagaaactaactcgtgggtgttagagacctgtctgagatgaccctggacttctgcaaccagctttgtgaccttgagagagactttccctttggggttccaagacaccttactaactctaaaatcccatcatttaaacagattgaatgagtaagaaccaaatgaataaactatctccatagatgtgtgtatgggctaaaagggttacaaagcagaagtgcaatggaggatgtttcactagacaaaataataagaagaagaagcccgttcccaaaggcaagatgtctgactttctcaatgttctgatctcaggaaggctaggtttcagagacgtagacaaaagacaactacattagagcagagtatgtctgtctcaacttggatttgcagaaaaaaataaaaagtaaaaaaaccctagcgctatggtctaaacatctgtgtttcccccaaattaatatattgaaattctaaccatcatattaatttgaggtggggcctttgaggcatcattaggtcataggggtgaaaccctcatgaacggaattagtgtccttacaaaacaggctccagagagagtcctcgtccgttccaccatataagaacacagagagaaggcttcatctgtgaaccagaaagtggaccctcaccagataccatatctgctaatgccttgatcttggactttccagcctccaaaactgtgagaaataaatttatgttatttttaagccacccaacgtgtgatattctcttatagcagccagaacagattaaaacagctagtgtaataccagaatggccaagagggagaaccttctcggttgccagcccacccagttgcagtaaataaattcaaggcagccagcaccaacacagcagagaagccacggtccctaccatccacgatgcctttgtggcccaaagttactccactctgggctgggcacagtggttcatgcctgtaatcccagcactttgggaggccaaggcgggtggatcatgaggtcaggagcccagcctggccaatatggtgaaaccccatctctactaaaaatagaaaaattagcctggcatggtggcacgtgcctttagtcccagctacttgggaggctgaggcagaagaatcgcttgaacccaggaggcagacgttgcagtgagccgagatcgtgccactgcactccagcctgggcgacagggcaagactccgtctcaaaaaaaaaaaaaaaaaaaaaaaaagaaagttactccaccgtgatttctagtggtttcggataatttcacttctctctggtgatctttatagctattcctcactacccctgtgaaattgtcacttagccacaaataaaatatttgtccctctcaagttattttcagtaaggagtctcagcaccaagaagccagggataggcagacatcttcacagcaatggtttcctcccaggtgactcttgtagcaggtgatggaggcgaactgaggagaagaggagcagccagcagtctactagcaatgtggactttcttcacattgggttcaagagcctttggggaatgatgcaataaagagaagatacaacctcttaccctggcatattcataatgtacatgtgaggcaaaagtgtcttcagtataacaatgacgtaagaggctgaatgtagcaatatacaggtgcaaataaatataaggtagatggagtgaatttgtgctacaacagcaaagaatgagtcacataggcctagccaagatacaaactttcaacaggtacatgattggttggggaagaaggtgggagtggaaagaataatgttctatgcaaagataggaaggtttcaagagtatgacaaaatgggcatgagtgaaaacctagttaaggaactaggtaggaggcatgtgagctcttcagcatgtaggctgggctccactcattaaattagctcacagatcaggttgctcctaaataattgtattttctatagttgttcctgctgtaatgtgatttaaggagatttgcaaaagcactcagtggtctaccaattaaaaaatatgtcctccaccaacccaaaattccattcactgaatcttcctgattatataatactgagggattataaattgactgtctgtggaaggcaatacagcaacagctcatgaaattacaaatcactaggccaggtgtggtggctcaagcctgtaatcccagcactttgggaggccgaggcgggcagatcacgaggtcaggagatcgagaccatcctggctaacatggtgaaaccccgtctctactaaaaataccaaaaaaattaactgggcgtggtggcgggtgtctgcagtcccagctactttggaggctgaggcaggagaatggcgtgaaccagggaggcggagcttgcagtgagccgagaccccaccactgcactccagcctgggtgacagagcgagactctgtctcagaaaaaaaaagaagaagaaaaaaaaaaagaaatgacaaatcacacctttttaagtagccatttaacattcagaaatttattctgcaggtatacttgagcgtgtaccaggttatttatttcagcattgtttacaagaccaaaatattgaaacaacctaaatgcccgtcacaaatggcatcactggttgactcaattatggtattcatacatccatagaataaatgcaaattaatagaaaatgtggaagttgttgagttattgacatgagacaatctcttaaatatgttgtttcaaacaaaaaggcaaagcccgtagggtatgttgtcatgttgttgaaaattaaaggggccacaaggagagggaccgtaactctccactcattgagtttggactgcatttggtgactttctcccaaagattacagtatggaagcgaggagaagtaacctcacactggagaaacctgacacacactacttttgccaggtgatcaaggttaacatcatcagcaataagtcatactaaagtacgtacccttgatatcacatgatgagaaaggcacttcgtctctgaggtcattgtctcaaaaacccttgtctaaccatgagaaaaacatcagtcgaactcaaattcaggaaccttctgcaaaatacttgaccagccctcctcaaaaatgtccagatcatcaaaaacaaggaaagtctgagaaactgtcccagatcagaggcgtctaagaagacatgacagctcaatttaagatgggatcctggaaccaaggaggggcactggggtaaaactagcgaaacctgataaactgtggaatttaattaattctaatataccaatgttgattccccagctgtgacaaatgtaccacaaaactatgagacgttaacaaaagggaaaactggatgatgcagtaaatggagactctgtcattatctttacaacttttccttaaacttaaaactagtctaaagtatagcatttattaataattaatattaattattaagattaagaaaatgtggcacatatacaccatggaatactatgcagtcataaaaaaggatgagttcttgtcctttgcagggacatggatgacgctggaagccatcattctgagcaaactaccacaaggacagaaagccagatactgcatgttctcactcataggtgggaattgaacaatgagaacacttggatacagggtggggaacatcacaccctggggcctgtcatggggtggggagctgggggagggatagcattaggagaaatacctaatagaaatgacgaattaatgggtgcagcaaacaaacatggcacatgtgtacctatgtaacaaacctgcatgttgtacacatgtaccctagaacttaaagtataataataaaaaaaaacaaaaccggtagagattttataattgcccacatgtgcataaacatctgtgggaagataagcaataaactaatcattgcagttgcctctagaaaaggacttgagttgctgggggaggtggtttgatttctatattttgaattatagttcatgcaaccatactacctctttaaatataagaaaatttacatcttataagaataaaaaagaatttttaatttacattttacatttgtttctaaaagacaccttagtactctgagtaacacattaaaccagtagctcccccaaagaattcattaacttggattcattgcttgtattcataagttggatgtcctaaagtacaaggcttcaaggatgaatggtattaggggtatgtaagtcttcagaaaaaagggaacattggatagtggtgttcttgggatattgtccaaaaaagtcccaagcctgcatgagacatgaaagtatgaggtaccagagggataatggaaagagagatagaataccatgcatactaactttgctgacataaaaaatgtatcaggattagctctcctctgcttcccaatagactacattctatatcatcccagttctaaagtgagcctccctctgcctcttggcccttaaccaagagaaatagactgaactgttgaacttctaaaggacacgggggaccccgcgagagctgcctctggagccattctttcctgcattttcccatcacccttctgtttcagccaccacttggcaaaaaccagctaagtggtgactgtgaaatgaattcaaatttgactccaagagggaaacagggctctccaggcagagccataagcccgagagaaagggcacaagattaacaggtcactgagccagccagggcgaggagccaggaggacacccaccgagagaggcagggaaacggttaataactcaaggtgacaaattaagctggctactcaggggctccagtttggctgattgtgaagtcaaaacagaacagtcggaaaccgggaaggcgctgtcacttttactgtatttttccacacgtatttttattttattttttaatttggaaatgttcgtggggagctggaaaatgcaggctggagaactcctggggtctgggaggggagacactgtgcctttgctggatccccatccaatttggaccagccgctccctatgagctccagccaccgggggcagtgggtctcctagtggtcgtcccccttctctgtcctccgccccccaccccgtggagacattctcacctcctctcgttttcaccgcccctctgtgccagcgtgcaacctcctgccaagttacactaacagtgttctccgtccaccagccacaccagcctccttgttgctgaacccagcagctgcttaacaggcggcagatggagaaagggctggaactctcaagcacgagggaaaccttgggtggagaggcagaggagaaataaaatgctctgcacctatcccagtcggtatgtggcaaggatctggctttctcagtgccccacatttgaacaactagcccgtggaaattccctaaaaggaacgggtaggcttaagatgtttaaaatgatcatgggccccgttttgggaaaagtgaaggagattaggacgaactgtgacaaatatattctgaggtttacctgccccttggatctaagaacccttgaacttcttagtggaaccttctaggcatgagtttctactgtgcacgtactttctaaattagaggatgcacgcttatcacaactttacatttaaatgatactttctacatcagaggatacaccctctgcatagattaatcttgtagattattttaactcctggtagtagaattgataacttgactttaatattaaagacaaatatggcccccaccaccaacaaccacacacacacacacacacacacacacacacacactcacaattcattctacagaggtatctccacgtggcattgcaattccaaatttcaatttaatgtcatccatgctaaagaagacaaaatggttttactaagtgaattataagcaagagaaaaaaggatagaaggcagcacacacaagtacagacatgtgcaggtcaaacacacacaccctttcactcccctttctcttccagcaagcactgcacttgcttctgagcacccaaaggatacttttgagaaccccaaaacagctgctgttgaaatggctcagctagggaaatgcttccctatcattaggccaaagctgtaatgctcaggtcctgggtttcttaacaatggtttggggctaacacctggtgggtcatcccctgaagaccttatatccacccagttgcagtcccgaccctatctcatggaatagtgcagaaatacaattctcccattgttctctgtcttggagattgagggaggggggaatactaacccccacctcaaaaagattagtgcaattattagccaacagtaatggctataagccaatatgttctcaaatcctcctgagcaccaagtcaccttagagtctcttaaagccccaaacacaagactgtgtgttttcttgaatttggccatggtgttctcaaaggctgctgggtcggtggttaatgctgcccttacccacaaggctaataagcggagaaagaaacagtgaataatgcatgtgtctgagccctaggtccccatgcccccataagtctgtaaaaagcaggtgtccggtccagacaacactagcaactgcttcacctagcattgtttgggcaaaatgcttcttagaacacaaccatagattgtgacttgtagttagcattaattatagaattctcaagcaacgatgtgctttttccttctgtcaccttataggaataaattttttgacccctgtgctaccattagctctgctggtcattcaaggtctcccatcaggaagtatgagaaaagaagttaaattctgttccaggatttggtatacctgacttatactgcacgcgtatttcaaactgtagtctcagagaaacgaggtcttatcttaaactactcaatgtatattgattaaatatagatggtgatgggaaatacaaagaagaaaaattcaaggatacaaaattttttaaatatatttacataataccaaagcaaccgattaactgactgaatttaagtcgctgatcaattaaatgagacattaagataagaacttgtcaactgagtcaaaacattgactactccacttaagaaagcacatgcctgtgtaaataaatatagaggtatacattaacataaatcaatacctacagttcagggaactattcaatcattccttcaatcttcaaaccattactgattctctactatgttcctggcacagttaaaaccagaggcttgatttattttagagtagccatgttaaaaatctcttttatttctagagaaattcataccgcttaggaaacacaagcaaaggaaacaaaagccttgaagctgagcaaataaagaggtaattttctatgtgatggcaaattgggggagctttcaagcatctattgttcattattgggaagacctatgttaaactttgtacgcgtctatgaaatacatttatgaggtattaaatataaccctgttcctacgaattaataccatgtctttgcagcgttcagcctcatttctcacacagcaggctatcagaaaagtctctgttgaaaagtctagagcctgagtcgaagtcaccaagttacaatgactcaatattctccattatttattctcatacacataccttaacagaacaagcgatatacccgctgcgtttgtataaagctcccatgatgtacattctaatacatacacttaaacacacaaatctgtttgtcatctgggaagggtaagattttagttaaacctcagaaagacttctgtgtaataattggaagataactgaaacccctgatgattcattttctctactcacaaaatgagggttaataaaaataataataataaatgggtcatttggaaagtacctaaaatcctaaggctaaatgtattgtgtagatataggagaatctagtgttatagaaggtatacatcagaccactctctggcattattcactggtcataacatagatgggaatatatagctactagaagaattttctcctcggaatgcctagaactaaacaactgatacaattactgtccacaagcaatatggcattttcaaggctttgtcaagcaaatatttgaagtatatatatcacattcgggtgggcatttctgtgcaaatacaagcatgggcacaagcccatttaaaccccgtactcctctctgcaaaacggatataactccattaaggtctattacttgattatacccagtaatgattattgtaatccaggagaaggagaacagagtaaagaatattgaggctctgatgagacatacagccccaaaacccttgggtccccctttcatctttagttacttgtcagcccagaggcctggcctgtgggaacccagctcagcagcaccttcatgtggatgaactttctagataagcgccttgggtaccaacatgctgtaggaaatccgatccacagcccgtgcctgctgctcactcacttaactttcttgtgttggaaaccaggcaggggcccttcacactttccaacagctcccttgtttgcttatgtggaatcatgcagactgagagcaaagaagtatacaggaggcaagggcaggggatagaggcctggtcaggagcaagaagacttggggcaagaaagcctgccctttgggagaagagtcattcatacctctccatcaatccattgctgattatcctccctaactcccttcccccaattcctacacatcaatacaattcctttgtagaggttggccagcttctcccccagcaggtggccagaatagactctgctgggagattgcaagtcacccctagtgcctacatcgaggcaaaaagagaagaaataaggatcacagtgaatcatctgtcaaggttggcagaaacgagattcgactgacagctttttagcccaggcagctactcacctggatctggcatgaggcttgaccaagtcaggtaaaactccaaaatccaaatgagtaagtccaagagtctctactctgccatcttttcctctgccccttggccatcgggtgtggtttagctgaccaagatcatggtccttttgaattcagcagagttgtagaactcccgggccttattctaatcctgtctactattcctcagtctcgaagctgcttttgaagccagaaagcaccggcagtggagtgcagaaagcttgctccagacattgaatgagcccacagaatacctcaatctgatcttttatagtgctttgtttattacctgtgtgcccttatttcataagggaactgagaaagagagagagagagagagagagagagagagagagagcaggaatgatgaagatgactattagtagcaatccaaagacaccttttcttaagcctcattcatagaagcaaatgtggccaaacaacctagcaattgttctctcaaatgtcacctttctgtatgggccactgtgccgataaaactcggctctctcgttttctgctccccctgcagcccctcctgaaaaattacgatgttatcctccaaatatctccggagaaattgaaccgacaaggaaagcttttcttcttctccctccccgtgcaccctcctcccgttttttctttcttcttcacgcagcttgaacaatttggctctgttctgggtgcattcctgtggcccattctctttcggtcccctgtacaggcctgaggatggtgggccagaacacaggcccacattcagacccaggatagcgcttgggggtagggccggggcggaggaaagtgaaccaaatgtacctgggattgttgcgccaccaacctaatacctgggcagaaaaacaaaggctctttagaaagagcctgagcttcggggtaacccatcccccccaccctcccagagttcaaaagataacaggagctgaaaataaggcgctcacataattaaacttttccaagtcatttcaggggacattacacctgatgacagagaactcgctgctaaccctttttgatgaacaatctctgttaagacaagaagggagcctttttctccttgtgtgtgtgtccttgtgggtgcagacccgtgtacctgcacaggtgcatccgtgtctggatgaagtgatcaagccccacacctttttacataagcagaggtgtaaccatcgcttggaaatcctctgatttcaggggaacctacaaaatgaggaggccctctcaacatcaactctcttttattctcaacaaagggcatgtgggcattttaaattttttattcatgtatttatttttgcgtgggatccagaatttgcacttgcccaggttagagggtagaaggcatggcaatcagttctgacagtgaaggaaaaggaattcctgggtccatacaaatcttaaggtgtttagagggcctttcttccaaattaggcaggtgccacacctgttaatacgatcagccttcaagaggcaacttcaagacagcacctcatcatccttagcgtcatgctccttagccaaactttttattaagaggaagaatttttagtcagaaaactggaaaaccctgacacaaagagctacctgtacaagacaactgggaaacaaaaagggaacaaggggccgggtgcagtggctcaagcggcagtttgggaggccaaggcaagcagatcacctgaggtcagcggttcaataccagcctggccaacatgatgaaaccccatctctataaaatacaaaaattagccgggtgtggtggcagacgcctgtaatcccagctattcaggaggctgaggcacgagaatctcttgaaccagagaggcggaggttgcagcgagctgagatggcgccattgcactccagcctgggcgacaaaagcaaaactccatctcaaaaaaaagaaaaaaaaagaatggaacaagtgtgcaccttaacaccaaacaggagttctgctctcttgtaaataaaacacaaagacacacttacaccactgctctaaatcactgcttatttgtttttcaataagactatttgctccatgagacagggactatgtcactgaatccccaacatctagcacatagaagtactcaataactctctccgaatgttgaaaaattccagatacacgaggaagaggaaaacaaatatacagtggtatgctggagctgttccacacccactcacaggagccaattattaaatttatgagagttttctgagccaattgttaaacacggccactattaaaagttaaattctataaacttaaaacgaaataaattgtattaaaaacaaaggtaatgagctcatcacttccttattattttgctattacctatactctggaggttgtttacatctgctgtgtttatatggtggaaatactgtgtcctagtcactaccatgcaactctaccctgctcttatttcaattatgtcacatttttagcttaaaataggccgtggtgggaacactgacaccatggaaatctaaaaatgccataaatcatggttttatagttttgtaattgtctagacttgagacaggcatgaagaaaatattaataatacagattaaacataaaagtaaatcatgtcaagggtttttatattgtgagtagcaaaataacaaccaaaaagaagttaaggaaatgttcttccagtattcaaaaactactccttgattgaaagaagaaatcacttacatgattgactaagaattgaccttccaatatacatcttaattctttcatttcttttcttctttctttccttccttcctttcttcctttttctttctttttatttcttgttctttctccctttctttctttctccctttccttctctttctttctccctttttctttctttctttctctctctctctcttttttctctctctttctttctctctctctctctctctctctttcttttgagacagggtctcactctgtcacgcaggctggagtgcagtgatgtgatctcagctcactgcaacctctggctcccaggttcaagcaattcttctgcctcagcctcccaagtagctggggttctctctctctttctttctcactttctctttctttctctctctctctctctcctctctctctcttcttttgagacaaggtctcattctgtcatgcaggctggagtgcagtgatgtgatctcagctcactgcaacctctggctcccaggttcaagcaattcttctgcctcagcctcccaagtagctggggttctctctctctttctttctcactttctctttctttctctctctctctctctcctctctctctcttcttttgagacaaggtctcattctgtcatgcaggctggagtgcagtgatgtgatctcagctcactgcaacctctggctcccaggttcaagcaattcttctgcctcagcctcccaagtagctggggttacaggcaagtgccacctcctctggctaatgtttgtattttttagtagagatggagtttcatcagtttggccaggctggtctcaaactcctggcctcaagtgttctgcctgcctcccaaagtgctgggattataggcttgagccaccgtgccctgccattctttcatttctcaacagacatgaaaatatcaaccagcacttatgctggaactatactttttcaccaactgcaaaagaaaaaaatcagtaaaatgtttttgtgagaatcaagcaggtatatggaatttataataagggatatttaatattttataattatttgcaaattgtgtgctacacatcctttatatcaataaaatttatagtaaacttatgtccacataaacatgaattttttttgagagctggttgttaaatatttaccatctgcagtggctcacgcctgtaatcccagcactttgggaggcagaggtgggcagatcactaggtcaggagttcaagactagcctggccaacataatgaaaccctctctctactaaaaatacaaaaattagccaggagaggtggcacgcacctgtagtcccagctactcaggaggctgaggtgggagaattgcttgaacctgggaagcggaggttgcagtgatctgagaccatgccattgcactccagcctgggtaacagagtgaggccccatttcaaaaaagttaccatcacactactgtccaatagcgtacctatatgtaaggaaagggggtaatttgaataatttataggatgataattaaatagaggtataggagtatgtgcatatgtgcatgcacgtatatgtctaatccatcatttaacttggggttagaggcagatcacaaaacacagaaacaaggctattggtagaaaaatgaagcaacatgagctatttctacctgctctacaagtttcatcagggtcaccaagaacaagactcatcaaaggacaggcaagaaacaacacacacaaaaaacagaaagacaaatactgtgtgttctcacttataaatggaaggtaataatgtgtacacatggacatgaaatacagaatgatagacattggacatttggcagggtaggggagtggaaggggggggtgaaggatgagaaattgtgtaataggttcaatgtatattattaggtgatggctacactgaaagctcaaacttcaccactactcaatatgtccatgtaacaaaattgcacttgcttcccttaaatttatacaaataaaaaaatttaatgaaaaagaaaacagacaaaggaggcaagagtacactcttaaatttttcacacatctgcgtagtgttttatagtttccaaaaggacttttctacaaaccatattgtgtgagcctcgtgacgttcttgtaggaaaaacgaaccagagcatagtaccactttgcagatgagcatattaaggctcaaaaggcttatatagtttgcccaaagtcacacaatggagaatggctgagataagaacagaacccaggtcttctgattctcatgagaaagtcaaaatactttttggaacagctgttctggcaagttctatccctcttagacctcagtttaagcaaggaggcagtccagtggggagagagagcctatctgaaagccatgttgtcaatcccaaccaagcttactggctgtacctccttgggtaaagggcatttaatatcagagcccagggtttgaactgtgtgcccacttcagccactgcatccctggccagagtaatcaaattcaatagactaataactatggcagagtcaaggtcctacagcatcattgattagagtgctggttttcatactttttttcagaatagcaaaactctatgttttccagcaaaattctatttgaaacagtaaaatacaactcacagaaaatgaaaagtttctgtagttgaatgggaatggtgggatgacagtggttggttactcctgttggcttctcatggggacccttaagcacccccaaagaaccatcatctccttggggccctttaaaaaaaacctcaccttagcatttaatgctattgaggggagtatgtgtgtttgtgttgtaagactatgtatgcctgtgtatgtgtgtacgtgtgtgtgtgtattgagggggcagaggattctacgttctatattaatatggttctcctcctaaagcctggagaagatatcttagaatatcctgccactggttataagagagcaaagagaacaagtcggagccctttgggagaactgggtgaaaaaaatatacagctccaagcatacaccctaccacagcaaagcaactggtgaatctgcatccataataatggttaacagtactgctggttaagaggcaggcactgctctgagcacttcaagtgtcttagggttttaaatgttctaccatatccctttgagacagctgctgtcatcatcatgactgtgactgaaaaatcgatgcataaagaggttaggtaacattctcaagcttttactgcttgtaagtggtgaagctgggcacagatccatggaggctcagggtcagacgcataccctgtgatatctccagatggggaaggcagcagccaatcccacctctgagggagcctctacccaatcccagtcctggttctgagcgtgtcctgggatggaagttgcaatccccttgggggtctccagtttactgtggatgggggttatgaacccatgacttgctgacttctggccaggacctggcatttgcatttttcactgagccccacaaatgatgtgggcctggccctggttgaaatacaaacccagacacctcaagtccagagatggagctaccaatcaaagtgcaagacaccttgctcttcaatccctaagagccagcacctttttattatgccttcagctgttcaaagagctccttactccagcattggtggactcctccttcaaagctcacatgacaagaagaggaaatgtgtgtgactggtcaccagaaggccccagggtttgtcatgcgctcatcccacaggaagagggattttccattccctccaggtgtcttatgctcaccttgtattttcttcaggttctcttaatcattattctaagagcactaattagggtaaaatttcccccaaaggataaagggccaggttccccagacttatgaaatagcctataatgttggagattactccagtgaaagaaaaagcctaggcaaagagccagtatcagttccttaaggaatcccttttcctgagagtcccaacttcctagaatcctgagacatgttccaatgttttcttgggatgactaacgtataactccccaaagggtaggagctctgcttaactcacaagttactggcacaggaccatgccttgcaaatgacagatactttgtaagtatttagggcattggcgtttttgtgggaggggggcttcgtggatattttgtaggtttgtttttttgtttttagagatgggatctttttcacccaggctggagtgcagtaatgggatcttaactcactgcagccttgaattcctgggcctaagggatcctcccacctcagcctcctgagtacctgggactacagacacgtgtcagtacacctgggcactggcgtttttgaatggacctaattcatacactgatattggacttattaactctgtcactggcacctgtatcatctttaggtctagatttttagagttaagattgaggaggaaaatctgcatcctttctctggtctgtttcttccctttttatcagtctctgcaataaccaatagcaaacaagccagggccccttggctctttaacaaggccaaacaggtgtgagagattagctccctggatggagcctctgtccaacaaaacaatgtcaaattcccccctaataaagtccagagctgtaagcaattcccccttgttattaagcaggaaagaaaatacagccggctccttcccaattagcttggaggaccctccaatgagctgaatttaaaccagagaactgccatgatctggcttccaccataaatagggcctgccttctcccaagaatgaaaactcactggcccaagctcccagccttcttggcacgatggggcagacagcccccaaccccccaccccaatatccatgggctgtctctgcctctgattcaaaccatctttacaactccctgccaaatcccttactttgattttccatatggaggcttggtctcatttgccaggttggtgtttataaggatgggttttttgacagtttcgctgtcggtgaaacagaggatgggaccccaccccttgaacatgaatcactttcttgtcatccaaaaaagagtgaaagatcaacattctgaagcaataacaacaacaaaatagaaaccccagaggtatctagcaatgggaacgtctcgtctttccttccctccccgcatcctccacctcaaactaataggccatggagtggaaaatagactccaaggtgcttcaaaaaatggcccatcactctgttacctcatgtttacacatggggtacataaacgcagactgtaaaagtcacctgatggtttcccccacgccatcttagacagtggtcagagggaatctctttcaatcttgaacatcttacctgaatagggaatgtttaaacattcttcatctcagtaaatattatgatggccaggctatgccctaagactttaaagcattgtattggtctgttctcacgctattaataaagacatacccgagattgagcaatttatgaaggaaacaggtttaattgactcacagttccacatagctggggaggcctcacaatcacagcagagggcaaatgaggagcaaaggcagcaggcaagagagcttgtgcgggggaactcccctttataaaaccatcagatctcatgagacttattcactatcacgatatcagcacaggagagacccacccccatgattcaattacctcccacagggtccctctcacaacacatgggaattatgggagctacaattcaagatgagatttgagtgaggacacagccaaactgtatcaaacatcaattcatttaattatctcaaggaccctgtattagcctgttcttgcattgctataaagaaacacctgaggctggttaatttgtaaggaaaagaggtttaattgctcatggttctgcaggctgtaaaggaagcatgatgctggctggcatctgctcaaggcctcaggaaacttacaatcatagtggaaggagaaggaagagcttgtacttcacatggttaaagcaggatcaaggcggaggggaaggtgcacacacttttaaacaaccagatcttaggagaattcactcactatcatgaggatgttaccaaagggatggtactaaaccatttgtattcgtctgttttcacactgctttgaagatactacctgagactgggtaatttataaacaaaagagatttaattgactcacagttctgcatggctgaagaggcctcaggaaacttacagtcatggtggaaggcaaaggaggagcaaggcatgtcttacatgtcagtaggagagagagcgagagcaggagaacctgccacttataaaccattcagatctcataactccctatcatgagaaaaacatggaggaaaccaccctcatgatccaatcacctcccgccaggtccctccctcgacacgtggggattataattcaggattagagggacacagagacaaaccatatcatcattcatgagaaatccaccctcatagtccaatcagctcctaccaggccccacctccaacactggggattgcaattcaacatgagatttggatggggacacagattcaaaccatatcataccctgtgaatttcctctcatttttaaaatgacataactgagtatttcaagttactcatccaaagcaacagctagccactgatagagctaacatttgaacccagcattcagttccagaactgtggtagacttctatttgccaaatattcctgatccctccttagccccaccttctgggcacatcacaggtgtattagtccgttctcacgctgctaataaagacatacccgagcctgggtaatttataaaggaaagaggtttaattgactcacagttccacatggctggggaggcttacaatcacagcagaaggcaaatgaggaggaaagtcatgtcttacgtggcagcaggaaagagagcttgtgcaggggaactccgctttataaagccgtcagatctcatgagactgtcaccatcatgagaatggcaaagaaaagacgcgcccccatgattcaattacctcccaccaggtccctcccacaacacatgggaattatgggagctacaattcaagatgagatttgggttgggacacagcaaaaccatatcaacaggactacatttcttgggctctggtatttggtggggccttgtgactggtgctgggcaatgagttgtgaacagaggtaatgtatatcactcattacccaggctgagccaatgtgcattcccccagaatgcactgtgcccctctgccatgctccctggcaatattccagaaagttcccgcctgagtcccagaatatggatgacaatgacaagcgggctatcacctcagcttctggtgatagatacagagtgtaagaaatacactttcattatcttaatccattaagatatggggtcattgccataagagtgaggaagacagctagttttgaaggaagagaaaggacaaagcttatgaagggatttctggggtgactacctatgctctatttcccaaccccagtgctggttacagggacattagctttctaataatatgataaatatttgttttgtgtgggtttctgtatctttttatttgacatgaaaaagttacaaaatgtttaagggttattaccacaccctaatgcaaccaaagctgactgatacaccatcgtggtcccttttataccatgctttcttatgtctcagttatcccccttctgcttcaatgtcaacaaatttctatcttctgagatatgagaactaaaacgtttgttttttctgataagtctaagtctcttaatggaaaggacaaagcagaaatttgaaatgaaacatgaaatgcattatggaggcaaaaagtcttcaaatctgccttgtctagaatttccttagggattatggcttcattacaaaaggcaagacatgactgaccctgaaatagagaatgccaatactggacctcacctgaaccctctctctgagtctacttttccctcttccagatcccacaacacaactccttatggttaatttttaatgcgtggcactttttcttttttttttttaagacggagtatcactctgtcacccaggctagagtgcagtggtgcaatctcatgctcactgcaagctccacctcccaggttcatgccattctcctgcttcagcctccctagtagctgggactacaggcatatgccaccacacccggctaatttttttgtatttttagtagagacagggtttcaccgtgttggccaggatggtctcgatctcctgacctcatgatctgcccgcctcggcctcccaaagtgctgggattacaggcgtgagccaccgtgcctggcccaatgcatggcactcttattagttgtacacacagagtgggggcaaattaagatattagcttcatgagagatatgtagtgaggaaggctcacccaagggagaaggtcttgattactttcagcttgctcttattggcaaatgtctgaaagatattcaaaggaaggctctaacacatctacagaaaagccagggtacaaagggcagaggggaactataatgtctttcccctgccacgaacctagctcaagcaataaaggtggcacttgtgacataagggagcttggaaagacagggagtcactagacattgtgccaaaacaactcccacaccccaaccaatgttagccatagagaggcaggatgctttccttttggggccctcagctagtgtgatattctataatccattccccttctatgtatgtcctctcctaagtaaatccatcattccaaagggaaatgacaaagactgccagttctttttttaaaaaaattattgtttgggggtttttttgtttgtttcattactgatctactcatctacaaaagttgtctgcagtttcaactgtattttagaaatcttgccctcttggccaggcatcatagctcatgcctgtaatcccagcactttgagaggctgaggcaggtggatcatgaggtcaggagttcgagaccagcctggccaacatagtgaaaccccagctctactaaaaatataaaaaattagccgggcatggtggcaggcacctgtaatcccagctaattgggaggctgaggcaggagaattgcttgaacccgggaggcagaggttgcagtgagccaagatcacaccattgcactccagcctgggtgactccatctcaaaaaaaaaaataaaataaaataaagaaagaaaaagaaatcttgccctcttgaaaaccaactcccaaaccaagtctcagattcttatcaccctcctgcaaagcaaattgctgagtattcactccagattcagcccattgagggtcctctgtcagcacttggaggctgttgaccaataactatttcccaagctctgtgcatgctaatctaacctcattaagccaatgcaagaagctatgtgattgatttatcctgtataataaaaccaggttattactcacagggcaacctggcacattatctggtcccttctgcaagtggtagcaaaccagcaacacaataaactgccttgctatttcaggagagataaattgctaatctgtggttgtcataccacaaatggattttcattatagtctggggcaacactaaacttcaaggtcctgtaattataatccattgatttttttattgtcacccactaaaagcaaaagcataaaatattatcattttaacaccaagttccagttgagtgtgaaccctgctgctgtaaattacaggtggtaaccaacagattaagccagtgactcccttctccctcatacctagaaacatgcccgagagaagccgacaccaggcataaatcatctacaaaggcatcaaaacaggtcatcttttccaagcacaagagtctgccctttctctttcatggcatttctctctttctaccaaacatcttagttgtttgcaagagattaaacagcataccagtacagtctacagactcaggaggcaaaatgctttactttgaatcctggatcctcttattcttagttgtataatcttgagcagctgtgcctcggttttctcctctgtgaaatgggtaagttaatgaacgtgcttacctaccttgcagtgttattatgatgactaaatgagttaattcacgtcaagcacttaaaactgtacctgcacagagaaagcattcaatgcatgtaaggtatcattcttattaccattatgattaccacatgaaagaaagtatgagtgactgtcattccttgccttctagactataagtcactttttagtaggaaacttgttttagacatcttttaaaatatatatttagatattaagactctgaacttattaaaggcaaattctggaatttactaaacttaaggtcccatgggcccagcagcatgcctgtggggctcacacctaactggatcttggtgttaaaggtataatgttttatgcttctgcttttagatggagatatactctctctctctctttctctctctctatatatgtatatatacgtatacatatccatatatagatatatatacacattatatattttatatatatatatatatataatacatatatatatagagagagagagagatagtattaaacaactactgaatgaatagaagctggaagtaatttcccacttaggaagaagacattttgactatgagactaagcccctaagtgaactgtgattcccacacagagttactgtagaaaggatttccacatcaagtagaaggctgaaccagacgacctttaataacttttatcagttgagactgtgagattcaatgactccatgacacttgcagattcagcttcagatttcagccactttacgggaaaaagagacacatcgaaaacttgatcctgggacttgcaaccccaccgtggcacttctccaagaaatggatggttttcacctgtgggaaataaagtaagtatgaaggtttttaacaatgggaaaaaagagaaggatcatctagcagtgattataacctagacggcctaagacttacctctaaaaggacccaaggcaatgaactttctcctcgtgtacaaaaaaggcctttatgccctatattctcatcattgaaagaggtagacaacaggaggggggcaaaatatggccttccagatgtgtcagggttgtgataagtcatgtttaaactttacccaaagtgaaataaagtgtcaacagaaactcctgtccaaactctctgatcaggtcaggcaaacaaccaatcgaaaaaaaatcaatcaaatgtgaaaggtggcccaaaggggtgggaatgcttaactccgggattcccatagaagccaggtctatttagcaacatgtttcttgcgagctgctgcttcttcttgtggtcctgaaacagccagaaagcacaccagagggtgtcctttcatgagctggcttgaccctgagcaggctgagaagttggtggcatttgccaatgccatgaagaaggaaggattctgggacggatgagctcaaaactgattgtctgatcagccccagggtcagtgctttgagaagagagatggtctacacacctaagaggaatgggaaatttagccttgatctggaattctataagtgctcaaagaaattagttagttcttgaaggtgaaagaggagagcaaaaacttctaagtacacctggcagagtggtagcaatatgcttccacatggcctgtccagttggaaacagactgcatttccccaggggtaaggagtcggcaggaaccagacagaagcttgaagcccagccaaacagactagtgtgtaggacaggattacaattgcaagaaggaggtaaagtatatataaatcagaaatgggagaaaggatccaatcttatgaatggaataaatatggcacaattcaatgggttttgtggacaagaaggtgtttggatcttaccttccacaacaaatcaaattctagatgcctagtgcagatggaactcttaaagcatcaccattctatctgggtacgcccaggaaccaaatgggctgatggtttcagctagataagactggaagacagcaaggacttggaaatgtactcacagaccctcctacccgtgataactgacttcagagcacaccttcattcccacctttctatattttaacatgggattgagactgggacagaggttaacaaggcatctcaagccaatcaagaactagatgcacataactgcatttgatggggaagtaaaaattactacaaatttaaaaaaaagtgtatatacgttcaccaagtagctataattctagggtcttatttttaaggaaaaaaaaatgcattaaaggtagaaaaggagaaacataggtggagggagaggaagaaagctggagaggaaggcattttgaacatctatcactattatattaggaacttcacatgaaccatctcatttacctctcacaaaatctatgagattgagacaatgctgcttattatggcatcgttaatcatagtgaaaaattgaaaacagccttcttgtatactgctaagagtgagtaagcattatgctgcaccctcataatgttttaccacagagcctttaaaactgtttataaagaattctgtcctgataggcaatgttcatagtaaaatggtagtagaagtatataaaattggttatgcaatagagttaccaaaataattatatattttacttgtttatatgtgtgtatgtatgcagtatagctgtatcttaatgtatccacatgtttattaaaaaattacggttataaatgggtggtgggatcatgaattatatttattttcttccttactcttttctatgctttccaaaattttacaatgagcataactacttttataataagacaatgaaaatctttaatataaacagcttatttaccatatgctgttaatgctaatatctgaacatacagtactttgcgaaaacaccatcatcaaaggaattgacagggctatatttgtcaaacaaagacaaactacagtcaataggaaaacacctaaaatatgtcaataaatgctctgctgctatcggccttgcaatatactttatctagtctcataaaaaaaaatcatgaggcatatgacccaaacaaatatatattcaatgtgtttctagtttgaaaataatatgccctgatagtgttctccattgctattgagactactttgcatctagaaacatttgcttagaaaatgattaaaatcatatatgtgttattgttattcccactttttaaaatctaaatagtaagttttagtttgtagcatgttttattaatcaataccaatcctaagataataagcctaagataaagagtgtcataaacattttaataagaacatatggtgggggaaattgacagagcgaggcctttgaagggcggttttctttctctaaagcaaggtcataaaaggccttgggagatgaaaatagattgggtaggacccagtggtccatcactgagcatggcaggcagggggtggcttccttccttctgcttaaccctacggcccacctgtgccctcatcaacggcctgggactctaagtcagagagggctgaaaagtgctaatgagacaaactggaaggcaaatcgtatttaatgccaagagacgtaactgatttggagtttaacagctataaaccatgactattccaagatggtccagatgggagacttttcattatattcaagagtttagatttaggcaagtagggctatgttatctagaggactctatcttgttaaatactcaagggtgtttccaaggaagagtatacaatatcttgcttggaatattaccatggataaggtagatattaagagtaaatgattgcttacacacaaccatttgaaaagcagtaaaagagacctgcaaccaaaagtgttttcttccttaaagtattatgatacctacggtttcaccattggaaaattgagctacgcattattttttttcaagaacctcacttaaaaaggctaatagagttgctagtggtaacacaatgcaatgacttgctggcatttggccacacaacaacaaactagcatgtgttcctccatagatgcagagatctgaaatagccagaacactgctcagagaaaaggggagagtctccagaagaaaaaagacaccaaaaaatctgcaaatgatggaaggagaagtagtccatgggaagcaacgttgaaaactgcataatccccagtctcaccttgggtggctcctgcgtttggttctccaaggcagcaggagggatgaaatagtcatgaacattcccttcagatccagagtttctgcatccagttattacatccattgcaagtctcttagtgacctcctttccatttctcacactgtgaatggacacaggacccaccagaaggggaggcagacatcttttgaagccaatcttgataaaggaggtgcttccttttcaccccatagtcagccaatttgttgcctataagctaaaaaccaaacctaaatactgaatttgaaacttagcacaatgaccaccaccatccgagctctctggaacctacaggtggtaaacagggtttctcaaccacagcactactgacttttggaaccagttaatctcttgtgggacaaagggctgacagctttcctgcacagtgtagggattttagtggcatccctggcctctactcactggttttcccccagatgataaccactgcactaaatgaacagaaatctttattctcaagaaatgcaggctacataagtgcagtcccatctcattcaatgctttgtgccaaagttccccactggacttgcagcatgattataaactcaggggtaacagcaatggatgcctcttccaggtctatgcaaaagcttgaacaataaaaagacaattcccatgactaggagagaccttcccaagaagaccattggccgataagtccaaaagctgttgggttctccgcatgtgtggtcctaattaggagatctgggtagcatttgtaaacaaggcatttacatctttgtccaactgcctatagtatgggaagttatctccataagggacatctcagttgactcatagcagaattaccataaacatctctatgattccccatgttatattgtcactctgatccctggctgggtttgagaacatataaaagatagtacagagactctctatctcatcctggtaccatcttgcagtggctcatctggagttagaacctacccatctctcgtcttcagagtcgacgaggtaccttggaatcaaagaccataaaagtcaacgctggaaagaacataaaaaaaaaccacccaaccagcccctcatttcacagcgaaattggaaagggttatcagctaaaaatggactgatctagtttatagcactaaggaaaaaatagcctcaaagcaaacagaaacctcaaaccaatgacagtcaatcctgcttgggtggctctagctctttgcgggaaagcagtaaagccctcaaacattttttttcttttaatatttttaacttgaaaaactaaacatgctctatagatcatttctgaaactccaaatgtttagaaaggcaagcttttttttttttttttcaccctgaagcactagacagactggtagaaaagggggaggcaaaggtggattattttttaagccattcatttatccacacttcctctgatcctttcccctccccacaccatcccctgctgtcatttatcaagactgctccaatcctgtggaattccactcattcttcatcagggctttgacctcctccaatcaaacaagcaaggtacattctgggagagtgctaatgccagggtatcgggggtgcagaggaggaaacaatcgatgctccaggactttcccacgcttagtggaatcaattttatcggtgtttggacactggatgtcaaggctggtcaaatggaagccaaaggttctgtgggggagggactgacagaggctgctgctgaggcttcactcatgggacagcttcctggaaggggctggttacctcaagtccagatcattcagagggacatgaggatcacactccgccaatgcagatgttgagggaccttccctctaagatgtgaaaaagaccccaagcaaagttcccaatgtgccctctctgcaccttagaaaaccacaaggaaatatggattggttccagaaaaaggcagatgccacaggcactgggccctgccttcatgattgcatcaaaactgttcacgcagctgccttctctcaattatccaagagctgttagtcttcatgagtcttgtccaaatcttttgccttttctcttcctttggctgttccctgggatcgtgatgattactgctctcatccaaggtgaacagaaggtgaaattcaaaccggtcaggctgctgatagaatgtttggaaagagaaggcaggtgaagctgctgcctcagtggagaccctgaccttctacctgctgtccctcccactttctcaaaggcaccaatctatgctacacctctgggctgtgttcacgttgcttcatcattccatggccctttgtcccccgacccttgccatctactgaacatccctcctgatagcaggactcagttcatgctcctgggtgaagctgtccctaatgtgccctagtaagttgcctctccctcaactctgttcccattctgccagaaataaagtgactataattttctgttaatgtttgagctcctctgaaggcagattcatctttacctgattcatcttcacattccctggtcccagcacaatgggtagtatatactagatgttctataattattcgatgagcacattaatctgtagatttttataatcaagattctttccactccttataattccagaaactggggccttaagtgggtgcaaatgtttgtctaaaccaatacattgactgctctacaagaaaatgctggtgtggtccttcagatattctgccaggtacctccccacctaatccctgaccgtagcctcagcccaactgctctgaagcttctagtacctgcatggctggacaagggacactgggatcaccacccacaaccctgcatgctgcaatcttcttcccacaccaaccccactctctctgccccaagcaagatgactatgcaaacgagagaaggcctaggatctcaagtcccagtgactcacctgccagctctaggcatacatatatgacctgtagacttcatattaaatcatcctcttcctgataccaaacatccttatgggtgactggtacatcctctggtaatccaaaaatgtcctacatacctgtgtgatgtagtaagctactgtctcccagctcccaaacctccaataccctgctctgggacgctaaaagagtctctgtaaatcatgtttttcctttgctagttgctcctaatagatagattctggcaatagggggcagtaaagggagattggaatcaggagaaggcagaatgcatttccccactttttttttacttgctgctcccgccagtgctacctagcagcaatacttcatccctacagcagcagttggatacagcccccatctcctagagtcagcctcaaagtgctttctcagaggtacaagctctaggaagtcagtattgctccttccttagatatttgaattccagctctataagattcctccttcaatctcctgggatgccatcagcagccatatagggcctccccctcagaggctgggcttcaactcctcaagacccttcctctgatcctttaggttgcaatagacctaatcttttcccttattccccagccctggtaggggtagcttcttcctgaagttactatctctatgttatctcattgttcccatttcattacttcagccttccaaaaaggctgaaatatatataaccaacttcctaaattaaatcccctctgttgaaacacctaatgtgctttctgtattcctgcatgcaccttaactaacacaatatcccaaaattctttctggttgttacctaagggagaaatctgaaaatcaactcaacataatgcttaggaaacaacaggtgctggagaggatgtgcagaaataggaacacttttacactgttggtgggactgtaaacgagttcaaccattgtggaagacagtgtggcgattcctcaaggatctagaactagaaataccatttgacccagccatcccattaccgggtatatacccataggattataaatcatgctgctataaagacatatgcacatgtatgtttattgcagcactattcacaatagcaaagacttcgaaccaacccagatgtccatcaatcatagactggattaagaaaatgtggcacatacacaccatggaatactatgcagccataaaaaggatgagttcatgtcctttgtagggacatggatgaagctggaaaccatcattctcagcaaactatcacaaggataaaaaaccaaacaccacatgttatcattcataggtaggaattgaacaatgagaacacttggacacaggaaggggaacatcacacactggggcttgtcgtggggtggggggaggggggaggggtagcattaggagatatacctaatgtaaatgacgagttaatgggtgcagcacaccaacatggcacatttatacatatgtaacaaatctgcacgttgtgcacatgtaccctagaacttaaagtataattaaaaaataataataaaaaaacaaaaaacaaaatggcagcagagtttaattcacgtatttcactatggttttgatactagtgaaatactagtatcaagtatacattgaacaagtatcaaagtatacttgtccaaagttatttggacaagcctacaacctccttgagtttctagtcttgaaaccacagtgggagcagataatctcagcttcttgctctgtcttaaaaatgcagcaaaaagacagcccacataaaagagctttaaggtctatgttagaaaagcaccatcagcaatacataactactttgactaacaacaggctgcaaagacactccctagttttgatctcaataggctctgcaaaacagttctttcacctatgccaaccacacaggaaatatttcagagctgctgctttgtggaaggttcacaccttgatgggaagagctttaaatctcccatttcctgtattgataagagcatgatcacctattttcaaaataaggttcattctcaaatgttgcaatgccaggtaggccatcctctctgctgggagaagaagtacttggagggtgtcagttttgagaaaaggatgagaagcagaggggagggaaacagcggagtaaggacaggaagaatattttttgttcatgtttggagctatgccaaggtgttatattcccattaagaatggctagatctggaagaaacttgatggattagtggaaagtggaggtggggagagaaggcggcaccatcaattgctgaaattggccccagacaggtttcctcattgttctgccaattggttttgcaataaattggaggaaatttggcgagatattcaaccagggcatggacagtgtactaggaccaaaataaacaatggtgaataacttggcagttttttattggatatttcagaagtgagttatgagacaccaagttgtgagttagttcttacaagtttacatagtgagaattaaaataaggcgatagatgacaagttttgctcttaaaatttgggagacaaataccaaataggaaatctagttacaaaacatacaatgacccagagaagaaaaacagaataaggtcaaatatttgagatgacatagcacatagtcaacatattgaactcaaaggatttaccccagaaactccacatacagaaactacagaatatctagtaacttcggatatttttttttctggaaaaagatattcctgatatgcagccattgctgtattttctggaatgagtatctatgaattaacagagatttttaataatttgtttactgtgaactcttttggaaatgtggtcaagtctatggacttctttttagaattacatgtgtaaatgcataacttgaaacacaacgaattataaaataaattatatggaaatgcagttgcaatctgaaagtatttagaaaataaaattgtgaaacataacatatacacttccttattaatgccgccaataacaagacctgaaggtgggtctaccaactaccataatttcgaagcagtgaagagtatagatgatatcttgagatttttacaacactgcagtgtgatataaaaatacctatgatttttgtcggtgataaagccttagtaatgaccaacactattgtgtcttgtcacatacacttgtgatggaaagaaatactacatttcaaatagaggttagaaaaaataaagatgtaattttttcctatcctaacttaaggattccaagaattctattcatagatcttgtttgtagggatctatgaacactgagctaaggattcatggacaactcttagacctaaatattcacatgattttaaaataatctttttttctattttcccaaaagatttactctattcattccaaacaaatggtttccttctaacataaatcaggtaagaccaaacccttattaaagacttggaatgaacccaaatgcccacaatggtagactggataaagaaaaatgtgatacatatacaccatggaatactatgcagccataaaaaggaatgagatgatgtcctatactgagacgtggatgacgctggaagccagtatcctcagtaaactgacacaggaacagaaaatcaaacactgcatgttctcactcataagtgggagttgaacaatgagaatacatgaacacagggagtggaacaacatacaccagggacctgctagggggtgcgggggagggagagcatcaggactaatagctaatgcatgcagggcttaatacctaggtgatgggttgataggtgcagcaaaccaccatgccacacatttacctatgtaacgaacctgcacattcaacacatgtatcataaagcctaaaataaaataaaatgtaaaaattaaataaataaaaaataaaataaaatgtttaaaaaaaacacttctatgttttatgttttacggtttcagatctcaggggtaatataaagatatctcactggtaaatatgggaagaataaaataaaataagggggaaaaaagattcttccaggcactctttgatctacgttgtgtcctaggtttttcacatcatatttatatagctcagagccacaacaggaagcagatggcacattcaaaaagggatgatttaagaaaggtttatttacagaggtgtggtatagggaaatcacaaaagacaatgcagtaacctggggcttgccatttttagactcaaaaggacaaacagaggtagcaattacttgatccaattagtaaaaggacaagttgagttggccagctttagagagtcaatgatcttcacttgggggaaacagccaacccaaaatgacttctcatgtaggaagccactggagaaaataccctgatcttaccttcctccccttttcctgcctcttgccagggttctccactgagtgaactcaaccagaagccaaaggacatggaaacccattgatgtccctcccaggacaaggtggatgaacagaaattgatctgaaaggacaaatggaagaaatacaatgcaatgttgatgaaatttcatcctctgcccctcttccctccatctctctcacctcttgttcgtaggtacttttcaccatggacatcctaaagcttcccaaatatgccacttctttcagttgtctacacattaacacagtctacactagtataccatttgcctcttcctctagttgagctcctagttctgtccttacttcgtgttcacgatcaagctcaaatgtcacctcctcttggaagccttcttcaatattccacagtgattttcatccatgcttgcctctgtgtttccccagcacatacatcactgccacattccccaaagcatttgcctaagaacatgagtcctgaaaggtgttattaggtagaacatgaaatatcaggataccttccaatattttggaaggtgatacctttctacattgcagcaattaccaaattcctgtagtctctaaatgaaaagcccccagaatgaaggggcagatttgtctgaagaattattcagatagcagtgcaagggagaagcaaaaataggaagacactgtgcctttgttgggtacaaggtatatcaattatatagcactgcataaatacacagagaacaagatttttcctctaaatcacaatcctggtcctcatagaatagaccctaaggaatatgcttatttaaaataagaaaatatcaattgaatgtaacttcaacaagagcaggaaggtcaggccaatcagtttataaggagtgaaacagtctaagagaccagatggcacagagacaggaagccagagagatgaagacaaaagttcgttggtaatatcagcaattctataggtatattttcgttgtctaaaacttattttttataaacacagccatttcacagtgtccacatattatttcttccttctgataaaaatctgtttaaaaaacagtcctacttttgaaaaatgttaggctatcttacagaacaaaataaaaagtctcttaaacttaaatgcttattgctaagtgaaagaaaacaatctgaaatgctatatgctatatgagtccaactatatgacattctgaaaagaaagcaaaacattggagatagtaaataggtgagtggttgccagaaggtgggagaagggaggcatggataggtgaagcaaggggatttttagggcagtgaaagcactctgtatggtattataatagtggatgcatgtcattatacattggtccaaacccatagaatatacaacacccagagtgaaccctaatggaaactatgggctctgggtgataatgatgtgtcagtgcaggcccattggttgtaaggaatgtaccactctatggggcgtgttaatagtggaggaggctgtgcatgtgtgtgggggcagggggctacaagagttacaaaaagtaaaatcactctctttaccttttgctcaattttgctgtgaacctaaaactgctctaaaaaatatagtccaattgtttttctttaaaaagagaacacttaaaaagaaaaacaaagtctcctcttcccacattctccaatttccataaggaaaggagaacagcaccctcatgggccaagcacaactgcagccatgtcactgagagggagatgggatgtaatccatagaaaattggagggcgttgactctgccatgtcctccccactagatctgcgtctaccagaaagtttttatgtcttgttcctagtcaatagggggtttgttcacgtagctcctaaccctatgttgttctcactttacagaaatgttccaccccaaagcagcaatggtacctgaaccacgtcagtccctggtggacactatttttcatacacaccttgaggaatgtcctggaggaatcgcttggcaatcttcagacgagaaatgctcatggtaaattgtggatttcttctttagctcctttgggggatgttacggataccatgcctccatggccagactgttaggaagtttaaaatcagaggtgattaccagggagtgggtacctcgagcaacctggaagcagggcgctgagacctgtcacacacagtcaggaactccatcagcagctgatgttggcaaggccctgagacctttccaaaataccaaaagcaaattcatttcttccaaatgagcttccctaaacttggttattagagcctgaccagttcagatggctgggttcacggaaatgaaaaccatttttctcatgaccaactctgagtttccagtctaacagccacagcaaagtggcttgatctctgttctactcaagttcacaaaaaggcaacaggtcctcagagggttgagcttgtgtgcattttcataagaggaaataaaacagaggtaatatgcagtaatgaaaatcctttgggggcactgggaactcagatcactgaatttctatgtgcaggtcctgacttatctgcaccttgacttttctatctgtaaaacacacctagcaaacttgacttctaagcatgtgatgtgatatggctaaagaagtcccagcaaagctgggaactgttcatcccttgagattattcactcacgttgctccctgtgtctcttactctccttctctacacatctatgcattgccaacttagcatacttgcaaacagctataaaaactgaatctggatctctcggatccttccacaaatttttagatatagaaatactgaacaaatgcctggaaactaatatatcaacctcaagaatggattgaagagagtgtgtgtgtgtgtgtgtgtgtgtgtgtgtgtgtgtgtgtgtacatgcatatgtgcatgttttccaaatcactttatcttttgacaatggctacaagagttacaaaaagtataatcaattcttttttggttaattacattatgccttactaaggacaaaaaacaaatatgaagactaaatcttacccatattgtttttttctcaattaatgtcaccaagtgtatcaatggattgtttttggctgcaagaaacaaaacacccagttaaaaggggtttacacagtaaggacacaccaataagtgaggaagtaggtggcttcaggaagggttcattcatcagctcaataattggtctctctcagagtctcctggctttccctgatggttgcaatttgtctgtcgcagcattaggcattacttcttacatggcaagtcaaggcaaaaaggaaaggccaattttgatgaattgttttatgcaatatttcccaagagcgcccagcaaattcctactgtctttctcatatgccaagtttaggatgcccacctctaagccaattgctgaccaagggatgttcaagagtgttacgattggcccagatcaatcaagttccctcccttaggatcctcctggtccacctgccttgacacattgctgtttaaacctcgacctaatcaaggttctgctaggaagggagtagcaggaatggacacactgggtagataatcaatagttgcctagttacaatactttcttcattgcttaaatatgtctatttaaacacaaactatataaacattcttaactgaataacagattacatagttatctgcaattggaacagaaatctactgtctatatgacagaggtctggaagtcctttttacaaattaaattcaaagcaaattttctagtttccaacttttaaaaaactttatctaagctattaaaatcctaacattcttataaagttaatctttcctccaagggtctctcttttttagtggtcataagactgaactgccaatcaaagatctaaatatgtatcaataagtattaacaactaaagctgatcatctttcatcacttctgtttttatcagacaaaataaaacaaataaatcaaacattactgagactggaatgattataactaaattcagctcacaatgaagtgaagtggtgtgtgtgcacatatgtatctgtgtgtgtgtgtgtgtgtgtgtgtgtgtgtgtgtggtattagtcatcaactacccatgctgacctgttagcaatatggcttgttgatatgattatttgaataaagctatacatttcaagtccacttaagaaaccaatcagcaatagctctgaattcagtaatagcttagatattttcacaaggaccaggccagatgtgtagtcagccatgtttagctttacgctgacattggaatcaatgtccgaaaaggggaaagcaaagatattcagggaaaacaactccagagtcaaaggaggtgtcatgccagctgaaaacacacttgtaaagagaatgaatgtctgtttttctgctcttttatcccctgatagaacaatcagcatcatccgctcgccagcccccaatgttttcatcccagtgagctagggcttctttcctaaataggcaactagcattgcaaccttcctcctcccatccccaccaaagcttacctatcctgtgtcctgttccaagatgaccctgcttgaaatgatggaaatgaatcctaaagatgaaattaaatgtcactgtgctcatgggcagtaatggtttgggaacgagacttgcaatggagcagttgcttacaggtcatgcccaaaaggagtaattcctcctgcagatcgcaggtatctcagagagggaggtaggtagagagctctatttgggacaggagaggtgtctcccagatcagaccagggtggtggacttcagttccatttaggtttctggacagctctgacgacaaggacagaggtttggtcacgtggaggtcttgagcccaagtctctccactttcaatgtgcacaagtcacagacacagccctcagaacctccacagcaaaaggctgagtccagcccagactccgcaaattccctcctccctcgcaggccaaacaagaactaattttaaaccaccacaacccagcttggggaaaaggcccaggaaagctctgcaacggaacagacaaaactgtgcactccacccaagttgtttacttctccacggagcctttcagggactaaacactggtctggggtttgggatgtcatccattctaccctgaaattcccttttcaggttaggattaggaaatccatccccacattggtccccacctagccagaagctcctgcctttgtcctctttttggttttcattaagaattcaagtctggattcctattacagaagagctgaagaaagagtcctgctaaaatttgtctataccatatacacacttaagctagaagcttctgtatcagtcagggttctccggagaaagagaaccaagaatagattatatatatatatatatatatatatatatatatatatatatatttatatatatatatatttatatatatatatttatatatatatatttatatatatatatttatatatatatatttatatatatatttatatatatatatttcatatcattaagaaaaaacaataatttataatttgctgtataacataatatggaatataatctataacataatatgtaatataatatataacataatatggaatatatacattatattccatattatgttatatagcaaattataaattattattagtatttatacataaatttacatgtatttataatttataatttggcacataacataatatagaatatataatgtaatagaaattttattagaaatagcatgtaattattatattatataaaggtaacataattgtgtgatatagtttatatatcaattacaaaggtaacataattgtgatatagtttatatatcacacaacataattgtgtgatatagtttatatattgtattatataaaataatacaataacataatatacaagtatttattagcttatttactttcaggaattagctcatgcaattctcagggctagaaagtctaaaatccatagggcaggctggcaggctggaaattcctgtgtgagctgaggctgcagtcttaaggcagaatttctcctccaagtttttggtcccaaggccttcaactgattggatgaggcccacccacattatccaaggtaatcccctttacttaaagtcaacaggttgtcaatgttaacatccacaaaatacctccttagcaacacttagattattgtttgattaaatgactgaatactgcagcctgtccaaattgacacataaacttatccatcacagcttccaacggctttgctggtatctgaatctctatgaaatcctgtatgatagaagctctggggttgttcaaacctcttagctatgtaaagccacagacttggtggacctaggatacacggtgtaactccaccccaggtcaggcagtgccaccccagaaacagaggtctcagtacccaaataaagtaacaataaaactctcaggttgaatgcttattatgtgttaaacaatttgctaaacatggtagcagcagcatttgacgggagctatttcactgaaatcaatccctcacattcttcctttagagatgaggaaaatctgaggctcagaaaggttctgtcacttgtccaacgtcacacagtgttttcagtgggggattaagatttgaacccgactgtcctaactgctcaggcctgcaccgtgtcctggagaaaaatgttatctccaagtctaaaagtggatagataatgaatttcttctttcttcccttccaccttccttccctgtcttctttccctcctttcttcccacctacctccctgcaactgctataaacgtctacgctgggcacagccctgagttcgcaagttagcagctggagagaaggggtggcaatagggagggaaggacacagttgagataccgagcgttttcaactagcaactaatcagggtaaagcaggaagagaagttttgagttgcaaaacatgtttttgccaaaactaaaaatttggctctgaaatgttaaaatgttacctccggccagagatgccctaaaaacatctacctttactcacactcgcacttaccctgatgacattttgatgcaaactttctctgactcccagactagaagagaccaaaggatgctaccaaaatcagtccctgtcttcaagcaaaagtgctcactgcatttcagatcttctcggaggaagagtccagcctcacctaagacactcacctgcacaatgaatgacacgtgacattgtcatggcagcttttgtcctgacctagccttaggtagcactgacaaatccactgcgtgctcactattgggtcatttgacatttggaatcggtgacctgacaacactgccgtacggaaaggctaacggaaacagaggctgcagccacagcccaggaacggtggtctttcgcacacatggggcagcctctgccacaactttttcttccaaggaaatcaacacaaatgaaaactggctgatgctctggtccaccagaggctgaagaagaaaaccgcaaaatggagactgcccaattctaatttaattcagaagaacaaacagggcatcactcagcggacttcaaatccccagtcagaagattttgcccgtggagcaaatcgtttcatgggccatctaccccacctactccctcctgccacagcaaggaggtgaaaatagctcatgaagccatggtgagtgacattctcgtgacattgttgtcaatgttgatcttgtacttttttaaaatgtcaagtcaaacacacaataggaaaaatttatttataaagtagctacagtactgctatgtgaggctcgcattctctctctctgctcatgtcactcaagaccctggtcaaatgccactttctcagagaagtctttcctggccacccaacactcactttccctcgagatctgctttattttctttgtgacatcaaactgtatgtttgtttgtttccttatgatctgtccccactattggaatgtaacctctatgcagataggggcattaatttaatcacagctgtgttctaagcatttagaacgatatctagcacacaggaggggcccgataaatatttgttgaatgaatgtatcaatggactggtccaagaatcagtcatttaaaagaccctgatgaaaacgagctgccctggggtttgatatttgaagtttctcttattggagagctagtctgaaaattcttgaccacagtttcaaaccccatgtgttatgattacactggtgtcagggaagctctgacttggctggtcagtaaactagctgtggaatttttctacttgtcacatggacaaaaatgtccttgaggaggtatacagtggaaagtttgagatcaagtgctgaaaatcagatggcccaggtcccagtcctggatctggcacttcctagatgagtcttgaaatactgatttaacattccagtgttttagtttccttgtctgagaaacatggatgatacccattgtatctacttcagagggtttcatgtaaggaaaaataagcagatacatgtaagtcacatttgctggcacataagggagtgctcaataagtgctagttattgttaatattataattttaaaaaactaatagaaacatattatttaatctagggctagtgcttgggcaaggcaagtgaagcacctagaaggcaaaatgttaaagggtggctcactctcaggtgctgaccgtgcacctgtatgactctgagaatccttacattttgagtgctaggtacaccacacacctcaccccagccccagctctgcaaggaaaagacgagcaagaaataaaacaatgtagtgcaaaaaatgttcaatgcagttggtctcgtggtttaacgatgtttacagaaaacacctgactccagtgaaatgtaattcacgagaagagccagagttcatacaaccacaggaccacagtcacattttagtgaatgtattcctagaggtctctggataaaatccttgctgataatgagaacagtggttctcagggccaatcttcagacttgcttgaggctcctagggcttccacccaatgtatctgtaggcaggtccacacacacattatgcaaagagagatctttgagatgaacctataaagacaaaactttatcattagaaaaaaaaagtgcattcgtaaatgtcataacaataaaattatactccaagactttgtacaagatgaaagtaatatgaagaaggggctacaggaaaaacctcaaaatcatcagatgcccaacttgtccaaacacagtataaggaaaatgactaacatggtttattcctatatatcattgtattagtctcttttcatgctgctgataaagacatacctgagactgggcaatttacaaaagaaagagctttaattggacttacagttccacatggctggggaagcctcacaatcacaacagaaggcaaggaggagcaagtcacgtcttacacagatgacagcaggcaaagacagagagcttgtgcaggaaaactccccttataataaccatcagatcttgtgagacttagtcactatcatgagaacagcatgggaaagacctgcccccatgattcaattacctcccactgggtccctcccacaacacatgggaattcaagatgagatttgggtggggacacagccaaaccatatcaaacatgatgtagttcctcccatgtcgtgtggataaaccaaccctgctctctctaaccacacatctgactaccttagggaatggctgagaagtcacagaaccagatacaaagaaggctaactatttctgggatatgctatcctaaattctgcccactaaggttgtccatgtagaatggtggcagataagcccaatttcctctctttcaggaaatatgaatattaagcaaaccaagacaagattggtctctaaagcccagttctctatgaaggttgctatgcctcacagtcctggctactaggatccggagagatagcatccctttctccccctcaacatgcaccaatcttgcaataaatccccattacagaaaataaactgagttgaggtcctctttgcagagcctgacataaggtttcatacttatccataatctccaaatgtactaataaattttggtaataatacaactatcaaactaaaaagagaaaatgaaaaaaaaaaaagtcggggaccagacatagtggctcactcctgtaatcccagcactttgggaggctgaggcgggaggactgcttgagcccaggaccagtctgagcagcctgctaagaccctgtctctacaaaaaaatacagaaattagccaggtatggtggtgagtgcctgtggttgcagctacttgggaggctgaggtgggaggatcacttgagcctgagaggttgaggcagcagtgagttatgattgcaccactgcactccacagagtgaaaccctgtttaaaaaaaaaaaaaaaggaaatgccaagaacaaacgtgtctgtctgtcatcatgttcttccggcatagatgactgatttttacagagttaatgaaaatatccacagtgatattcatggtgcctccacattttaaattatttctccactgtgcttgtaagaaaagagaagctcagatctatagtttgttactataatcaatattttagtgaccaactttcaaatatgccattttggctgctgaaccatttaactaagtcaaaggctacacaacacattcggccatctttatttcttctctttctctctttggccaaaaggtggtagtaggtaatcaactgatagactgcctttcaataatggaggtcaaaatgttcaaatccaggttccagatgtcctggttaaacagctgggagtggaatttgactcccatggaaagagtttaagccatgatttggtcattgacctccaatgtttgctctgacttcttacaggggagttcaaagtggaactgtgaagtttcccaagctccatgcaggtcactgaagtccaccctgcaaacaacagtccttcaccttctgaagacctgtcacctatgaagcagcaaggaaggaatttcttggctctgcttcctggcagtcattacctgtgatcttctatcccaattggttgaccctagcaactgagccccatgaaatatgtatttagtggactgaatgaattggacaattgaatcagaaaaagcaacaagaactcccaaggttaaaacaagtccaggactacactcctctcttcctgcctctccacattgatctgcagcttctagagaagactgagcaaagagatgctggtgtctttgacttcagggaagagcaatgtcaaggagagaggccagcagatttttttaaatctctattcacctgtcactgtccagcctgccattgtggtgggtgaagacaacatttagggattctagtgctagtaggatacaaacaacatttctattttgttattaagtaaataaataccactctttatcaacctgctccttcctggcgtgcagaatgacttatagctaaggtaaatggtcgctcaggaactcatagcacgtacccacttccaggtagcttcagctgagcattcagcacaacacagcataagggctaacagtgagcagaaagccccaaaactcagcacctgtctttttagtatctcatagagaaaaataaatgcagaaagcatattgaaagtggggaaagcatgcagtcttctgaggttagggccaggctgcagcaacagctatggttggctggactccctgacaccaaagaagaaaatgctgtatgctttcaaggagccttctggagtactgagctaggacataaaaacattcaactgctcttgccatttgaatggggaaatatatggttctaggcctgcagcaagaaaagtggtgcattccacccagcattctcattctaaaatgcaaattggatcacgtctgtcttcagcttcatggtattcattggttttagatgaattgcaaagtctttaacatcgcagagaaggctttttctggtctgaccgcagcctatttccccaggtttatctctcactccatcccatacctgcactggccttctgttttctaattatcttactgacctgccattcccagaacccaccatgttttctcttatacctggattttgcacatgctgttccctctacctggaacatattttccccacccatccattctctggctaactgttactggactgaaaagcatatcacagaaaacaaacagtaccagctgtcagcggacagtttttgcattgtattaatattttctttctctgaagctccagagaccaaaaatgtacaaaacaacaaatcaagcaacctcacatggtaaataatttttcaccaataaatgttaaatatagttcatatatgcttatattatacaagtcttctaggaagacagacattaacgatgcaaattttaaagttcatttctttaaaaaaatccatgtataatattagcagattattctttttggagtcagatatatgcggctttgagtatcagcgctgccacttactagcagtatgatgttatgcaaattatcaacccctttgtgccccaaccttctcatctgcaaagtggaaatcatcctagcacctgcctgatggacgtcttgtgaggatcaaatgagatgataagaatgaagtgccctgtgctacttaccaggcatgcagtgtactcagtcaactcaatgaatgatcactgttaccatcttcattgttgtcatcatcatcatcaatatgtatcaagagccctgctgcatctttctctggtggctcctggtgctttaaaacttgatatgctcattccattctgcagctaccaaagccttttgagggttaacctaaccttgatcactcctgaagagcatccaaccaccaccttcatcttgggcaacaggaaactacagggctcttctcaggtggttattcccaggagggggaaacttactaagacataccagaggtcctaatcaacagaataattaaaaagggaggcagccctcttctgcaatccctgacatctaaagagtctgtcacccttttctaagcctattcacatttgtatgcccaacttgagggaaccggggcagatgttactcttctcatcattttaaaatgaggaaactgaggcacctaaaggcaagctgcccaagctcacacaagtgaactgttcagctctttcttcagattaccccatcccatgcccactgtgcacacaccctgagcagcagcctccaacctcaatatcctctacccttcccaaaggcgccaccagctcctttacacagtttagttttcccttctcccgacaatggccgtctgtaagaggccccaggtgcctggaatttgaaattgtttttcttccctcccttcctgaggaccagattgttcctaagctccaggctgcctggccagtgcaggcctgacttgctggcacctagggttgcattaaggatatggatttgtttttgcaggactgctcatgagcgatggagtgctggcgttggcttccttgtgaaaggcacatggcaactaggcatgtatttgcagggaaggaaacttcaagaataaacagaaaatacacacactccatatcctgccagccaagccccagcctccccagttctgacaggtgatccattctgacttccttactgagccacacacccaagccaactgaaagccttgaagcatggcgggtgggaaggagcacaaacccagattctccacattctaggggtgtgggcttgaaaacctgaaacaaggtccacatctgaaacccagggaaagctatgcctgcctcttagagttattgcgagaattggaattcaagcttataacatgcctatcccaggcctggagagtgggtgccagggcatgctagccttgtcagcattctttttggctcctccaacataccagtcttctctacctcagggcctttgaatgtgctcttttctctgcctaggatgccctctcccgtcccttctcctctcactctctccttgtgaatgacgcccctcatcctccaggttccagctgaaatgtcatcttctccaggagccttttcctagctacccctgatgcaggagagagcccccatcctacctcaccccaataattgttctctatatagtttgatttctttgaatatttatcacaatttctaataatttttatttgctctatcttcctgtccaaattttaagctccttgagggctgctctctgctgtggcagaatttgtgcctagaattagacaggggctcaatcaaaatctgtttaattaataaataaatgccattactttgtgcaggcttaattagttcaagggagagatcaataacagccactagaacccagaatccctgaccctgtgggcaattttatctccagctgaggtaagatgaacaataaatggcagtggcagaaagaggcatagccaaaaaggccaagaacactaatggtcttattaccagaaaggacattgcaaaaatgcaaattttttattgtgtgttctataatatggggccagtatactacaccaactgggcatttccacccatttctgcttgagaatcttccctacctgaatgaatgtgttgacttaaaaacatctaaaccacctaagaatttaacagcagactggatgaaaaaaatactgtcagtgacaagttaatacataggaattcacaattaagttctatcgtacaatacagatttctgagggccttggattacaaacaaatgtgattctacacttgatagctgaaaaacttgctcagaaaataaaatacaaaatttctaaaccattccagagacctatttaaaaaagcataaaatagtctacaataacgatttggttaagtgctttgaaggtcagagtgagttagagttagttaggaaaaaattaaaagaaagcgttttggccaaggtcttgaagagagtgattgaacagagattggcaccaaaaaattataacgttttagaactggaagaaggattatttttattattaaacatagcccacttatttacaaatgcagaaaatggagcccagtgttccccaccccctcacccagttcctgcaggagaggagggtcaggacattaggagccggggctcccagtctttccactacatcacccaggccattttagaaggaggtggggcaacatctcagccagggcaccaaaacgagtgagcaggatgtggcagtggctgtagcaaccaaactaggctaggagtgcagagacgtgacaagaaacgctcgaaggtggacggagggtggccggcggccacctcatacaacacccttatttttggcctgttgacttgctgagcagcacctgagtcatccccctcaaggcttgtaaccaactcaaatagaggagcttacacatcaccctttcactttgggcatcgtgggtgcccaccaaatatgtgttgatttgctttgactctgatgctcggcctttaagtgtgagatgggggagtctgtgtttgctaccaccagagggtgttctgtttatgctagaaaagtgcagagcaggaaaaaaagatataaaccacctcttttatagatagcaggcattgctccttttgaattaaaatgcttttgttagtgtggaaagagttgagctggaagaatgtgtcagaggctggaagaacagcacagaggtgccatttttgccctccctttgctacatccaagcatggtaccatgggtgtggtcccctttctcgagctggagaaagagcctccccagagacatttggattccagctctgttttttaatagccacatgaccttgggcatgactttgacctctgtgagccgcactcccctcttctgctagcatttggggaagcatttcagcattgtgccatggcaaacagcaggtgctcaaaaaataccaattcttctttacttactgataaaagtagcccaaggggagtggacaggctgcatggagacagggaaagcaactcttcagtggtctggtggcagaaaaatgggagtttggggaagacaaatgggaagttcattttcatgctgctgataaagataccagagagtgggtaatttataaagaagaggtttaatggactcacagttccatgtgactggggaggcctcatactcatggtggaaggtgaaaggcacgtcttacacggtggcagccaagagagaataaaagccaagtgaaagagggaaccccttataaaaccatcagatctcatgagacttattcactaccatgagaacagtataggggaactgcacccatgattcagtgactcccaccaggtccctcccacaacacgtgggaattatgggagctacaatttaagatgagatttgggtggggacacagccaaaccttatcaatagagcactgaggaattgtcaaatcaggaaacaaacccaaaaacttctcaagaggaagaaatggggccatggttagaaatgaagagcaaggttcagaacacttgggcatgcagcccagtaccaccaaggcaagagcatttgagcaagttctattccctctttggatctcagcattttcaagtaaaaataaggaagttttaatattgatcgctgaaggtccttatagctctatggttcaatggcatcatacatgaccacggcaaaggggagaggctggagcaaaggaaactcctccctggttgtctttctcatcaagggcagaagccaaatagacaatcacatcaggacctagtggacttaatgatcctcagaatagtgtcaaagagataaaggtgaagtgcgctattttcagcccagagggtctccattctttccaggttccagctatattggggcaagttgcatgggaggcgtattaaagggaacaatccagtctatcacaaaaggccctgagattggacggcgtggtaagaaaatccattaaaaccgcctctggctttgaccatgtttgcctataaattaagctctggtacctaagccattttctctttcctgcccttccaggttgaaggaagagaagctaagaggatgaaataggaattcaaagtgcaagtccatcataccaaagagctgtctcaattacatcctgaccccttttagtaatgtggccaggggtgtgcttgcagttggtttagtcccctgacatttcaccacctccaagataggcctgggactgctgagaccccagtggtaaccaaaccaaggatcctgagaacttcccagtgcccaagctggcaaacaaaagaacatgagtgttgtttgggttaggtaagccgatactgctcttcctttccaaactatctgggtctgtggaagctggatatattagtttccgaaggttgcaataacaagggaccacaaacggggtgggggtaggtggggagggggttaaaataacagaaatgtattttctcagagtcctgaaggatagaagtctaaaatcaaggtatcagcagggccatgttccctccgaaggttctgttccctgcctctctcctggcttctgggagcctcagtcattccttggcttatagatgcttcctttcaatttcccaccttctcatagggtttcttctatctcatcacagcatcttccctctgtatatggctgtgtctaaattctccctttttataaggatatgagtcatattggattagaagcccaccctactggctggggtaattgagctatacccaaagatgagtatgacctcatcttaactaattatatctgcaattaccctgtttccaagtaaggtcccattatgaggtcctggaggtcaggtcttcaacatcttttggggaacacaattcaacccatgacaatgggcttctgtaatttatgatcaaggggtcaagatttgaaagtaacattcctgaaagattaaagaccgtgaagatgtactccttgtccccagtgtcccttcaccagaaacaatacattttgctggacaccaacacaagcagttccaagccagatactggcttataatctctctctcttcacccagcccacaactaactcctccatgagctgccaaacactcagtatacattctcgtcaccaagaaatgccactggaatgaatctgcaccaaagctgtttatgtgactaatgaacctccattacgttgcatccaagtaggagtaaaatttatattctactcaatgaaggagggctttcttgggggagggaatcacagatggctgggaatagaggcgggcatttagaaaaagccacatatatgaacaaataccaacactgcaacactgtaaaggtatcttgtatcaagttgggaactgtttctccaaacctccacaaaaaaaaaaaaaaattcaaactagaatactttcaggggtggcgggggagaaggcatccccttttctccttccatggtttcaggtacagaaagttgggggtagttataaaaaaggctccatcactggtgtctcctaacatattatttctgtattagtattatcaggcttgttagccaaagacagatgccgaacaaaaagctgatcacatttcccaatcttatttgcaaacaagcgttcatttcctgcttatcaaggcacagtgcgggtactttgtccattcaaatcattgtcttaagccagtgatgcaaaccaatgagcaaggttcaccccagccagagcctggacgctcaatgtcattgaactcaaggagcagataattagtattgaaaggtgtgattgcagcccagtcggccaggtaatcagcccctgatttctcttcaggactctagaccagttggaaatcttagccctagaggaggctggagggaattatcctggaagtgtagtatcccttttcaaatataaacaccagacaattacagcagccagttagcccttccttgctcagcacacttgcgtttcaggcagcgattggaagggaccccagctctgcccaggcagctgtctcccagccttggctccccagggctcttccatcagctcactaacatcttccaagactgtcgcaaccttgagatgtctctgcagactgagcctcctcatctcggtgcttgttttgcaaacatttggctgcttcatgggaacctgcctcaacctgaggcctgagctctctcttggctgggatggtgaagtcttcttgagaagggctgatctcttttctgatcactcagatcagatggcttggaagtgacaaagtgaaatgcatctctctgccatcccttcaaagatggaatgccagttctccgttctcagcagccaacagccaactttgacatagaacttggttgaatatctaaatggacactcacgtcggagcataatttttaggaaagtagctaaaggttcaaaacaggtccccagtctcctttctgaccctgggtggccccttctctctggacagggatgtcatctgacagggaagatacgtatggaaatgtagtcgcctctatatcaaagaatgctttctccattttctttacggtgctttgctttaaccaaattcacaatggctaacatagttagacagcaaaataaacatgagtggccataaaacactgactcttccagactctgatggaggctgtgcagccagctacccgcccctggacttggagggagggcctagtgtataaacagagtttgcatgcaagactccatgtgttatcaacatatcacattcaggctcctgccaaccccacagcagacacataactctacattatgtaatgtggaaatcagcaaggcttcgagaaaagtggctttttgttccttagaacctatcttccacctagggtagatgtcctcccagtcaagccaagcaactctccgtggccaccccccaggccaggggctcacagcttcaggccactgctgctccttctttcttttagaaagtgctgagctttggaacactgggcaaaggccttcttgccttctaaattagccttctcttgcttccattacaccatacttttttctgccaacattttattatgcaatttttcaaatatccagaaaatctgaaccactcctgagatctatttttaagttattactctctcgtgaatggctcttgaattcttctcctttcctccaagtaacatttttcaagatacctgttgtgggaaacatgtggcatgggatgtcagtgccccacatggctgctcaagttgtaatccagggcttctctcggttttctttcagagatgagaagagtccaggcttcagttacagacagaccggggttcttcctagctaaactctggatgtgtttctttactgctctgagcttgagcttgccttcaaatggtggtgggcatgacagccaatccaactatcctgtagtgagcacttactagatgccaggaactcttccacatgacacccaggggctctaatcctcatagtaacctcaaagggaggcactagtgttatcctccattgtagataatcaggctggaaacccaagcctactgcctgtggtgctgtaggaagcacgcagagtgtttatgacacacttagcacaaagccttcactcatagtggcttttcaacaaagaattcaaggattattcttatcaatagtggcaacatttttgcagagggcacccaatcagcacacagtcatacagaacacagactgtaataagcacttctcattgtcctggccttctacacaccattcttttagcatctgagtttgttatcagtggcctagcactaatggcagcacccctaaaccaaggctttatttggacagcaatcttctgtgtagctggcaaagcctcttctgcaaagcactgctttgagttctgatttttaattccgaacactgcatggtatcgttgtgataatgggaaatgttgaagtgctgtcattaggtacttctacgtcatatcagataaacagaattcagacacaagcactaaggtaaagctttattggatggatcatctttttttttaagtgatggaaatatatcaactctaaactctgtccatatgctctactgtaaacatggctattggcatggtgaaaatatttccagactggttcatccctcttctgttcacttcaaagatattttccacagtggttgccatacaaattctaaaccctaaagattctggggctggtgccccatagatgattagctcttctctagggtgaggtatggtttccttaaaagcaaatggactaccatctttcagcccaaaaagctcttgactgcctccaacccctccttcatcctaagctcctccaaactcactctaaacaaactctcccacaaggaagcctgtcgaaggtctttacagtaagtatcctggccttggaaaaggacaaagaaagggcgagcagacactgaatcttgatgaggaactttcttcgagcaagaggtagaactgaagcacagagaacgtggcatagcttttctaaagtcgcagaccaagttggtcaaaagaaagagagagcccaggagttcggaatccagagtgctactgtgcattagatcagtaataatttccattagcattaagtccagagaccttggaaccaaaacaaatccaactgtagaacaagtgttttggggaaaaaaaaattgaaagctccctaacaacatcatctttctcacggggatgaagtttcagatacaccaagacaggacactttatgagtcggataaattgtgtatccagaataagaacgaagaggtatatcctgcatcttcaccattaatagttaaagaatacaagctggaatttggggagtattgaggctagagtttgggaaaaagattcccagtccaggaaagggacaaacagctacagaaggaacagaatactgactgatccaacagtgaaactctccccaaaggagagttacaggcaattccagagctatacgtacacaaatatgattcttgctgaaatctaaagagaagaaagggtgaaaggcgaagagggatgagataaggtagtaggatccaccaggagcccacatacattcttgacaattataattaaggacttcctattgggacggacaatcctggcaagacatctggtcacattaatcctcctttgggctgtggaagttcaccaccagaggtagatgtgtcattgcagagaaacaatcaaggatgaggagagaaagggatgttttcggtgggctggcagcacaactttgtggactgccctgttttttaacaaacccacagaactctgtggagccaagtgttcttcacgctaggccagactttcctaccccaccttgggggtctgccagtttttgctggctccctctccaatgtcaagccttcttgtgaaatgactggtgcttcctgcttcccatcacaaccccgacccagacacgccacctctccctgggtatccgccctatggcttaatgaaagggagccaaggggctcttgaggacagagaagcccctgttcagaagaggagaaaaagaacagggtcacttccttccctgttttctaggtttcttccgcctttttctcttcccgccgtcccctcccatggccgctgctccttggccttgattcagcactgcattcctgcttctttgtgtcccagcctcccagcttgcaaggccgtggggatgttcagagagttaacagctccaagaaattctcatctccatagacctgtctacccacctcccacctgggctgcagagaaacagccaacattccttcaggcccacagagaaagggtgtgactcgaattactcaatgaagcctccaagccagcctcttatgcccccaaaacaatagagttgtatttttcttggacttcattcattttatttggtttctcctttgactagcagaaagaactcctttccctccctctccctaccaccacttttcttaatccaccagcttcactcttccagtagaacccaaccccccaaccccagtagggtgaagccttggatcatgaacttgagtgacgtcagcgagcttgagaaacgccatccgccatccgcttctcctgggctttctcacatgtgggaatcatctcttgggagtctgcatcccatctctgatctgtttgttttggatgctaatcccaggacgctgggtgaggtgttaggcagactgacctttcctgttttctgagtcagtgatcttagatcactaagtcaggtgctaagtgttgaaaattaaaatcaatgtgtggggcctgcaagagggagacaagaaggtgagaacaaagggtgaaaggggaaggtgacatctagttttgtttgaaacaaacaaaaacctatctatctgccataaatccatcctcatcaaaaagagattctggtagctggtgtctcgtgtgcctgtagtcccagctacttgggtagctaaggcaggaggatcgcttgacccaggaatattaggccagcctgggcaacatagtgagactctgtctcttaaaaaaatggcgggggttggagggattgtacgtatttggtatgaggcacacattacgaagaatatgatgtggacatgagtcctcctgacaaattgcctctgaaaagctacagcccatcttaactcccaaggcagcttccactcaaccccaaacagccaaatcttctggtattcagggaatttttgtttgattgtctactgagctcccgacgtatgtcaggctgtcaggctgcaatgatatttaaggagaatctttttttttttttttttttttttgaggcggagtctcaccctgtggcccaggctggagtgcagtggcatgatcttggctcactgcaacctctgcgtcccgggttcaagtgattctcctgcctcagcctctcgagtagttgggactacaggcgcgtgccaccacgcccagctaatttttgtaattttagtagagacggggtttcaccatgttggccaggatggtctcgatctcttgacctcacgacctgcctgccttggcttctcgaagtgctgggattacaggcatgagccaccgtgcccagacagagtatcttacctctgcaccaagctagggtatttaaggcaccaccaattccacccccagcttctttatcaaacaaacagatctgatggaataacaatgctaataatgccaggtgtttggcttggattggctttttaaatccagcttttatctcagaggtcaaaatcctgagcaggcccaagacaatgcagcctaaacatctttagaaactcaagacaacttctcattttaaatatgaggaagctgacttgttgagaagtgaactgttttacaggtcacattaacatagttatagaaacacagaggtcacatttttggtctaaggcactcctgatttggaattactccctgaaagatctatggaggttgtactgtattgacaaaaattggcttttaggtttaaccagatgccctacccatctgcccagtctttgttgcaggacagtcttcaaccctccaatctcccattccagcatagagcagggacttccttctacttcagcatatcaagcaaagcaggcacaattcttttcaacaaatatctgttgagtatcagttttgtgcaaagcatttgctcaaatcaaataataaaaagtacagagcccacttgtgaaacaaaccgtctcatactcttcatagacacgttttcaaaagtcagcaactcatcctttttcctacaaaattctgttctcaagagacaacttgactatcaaaggaaataaaatatcccattttctcttctctgggaagcacacacacacatttttataaaataataatttacctagtaggatttacacatcactgatgtaaatatactagacctgtctaaatctaaactccaactacacacgaatttttttaacgctccacaaaaaagaaaatgagaaaagcaaaactcaacaacaccctaaaggagtcagatcctctttctatattgtcaggtaattgttagcagaaatcagctgtaataacaagccattttaaaggaatgccaattccattctatcctgcttaaagaagatccagaatctgcctttgttcctaacctgggcagtatggagaaaataacaataccttctttcagaaactgtggggaatctgaaaggtaggattcctgctctcccagataagagctggcaggagaggtggcagctgtcaagggggaggcttgtgtgagccctggggtcagccaggagcaccctggagagaagaccaggaccatcagaagggagcaaagtaagaggtgcttcagggagaaagtgctttgctttccgaaacttaaaaaggatctccactcctcagtgtggacttgtgtgcagccaaggcctccagagactgcagaaccaccagtctctggaaacgtctccttcgtcgtcctggctgacggcatgtttgcagtttgggactgttttatgcagctgattctttccaagagtctgaggtttagggtttgggtgagcttgctgcttagcctttccccccttacctttttattcacagtttccgacacacaaagcactttaaattatccatggaaacctttgtgaccacagacttagaacacagctatgaccaagtgtcagaaacagggaaggcatccgcgaatgtccagctatgtggcatgaatgtgttgctttctcttttcctaatcaggtcccaaaagtggcatttctttgcaaagggctacacagacaagggctttagctagaaaagcaccactgcctgacatgctgaattaagaatgaagttgcccttgggttggtaaatttgggtagtcggatagcacgcagccaggcctctcctagccgttcaagaaatgtttgtggaatgaatgtgcactgcttgtttaaagagcacgctgtcattgttagaacacactggacgcttcccaaggcaggagttttaacatttaaatttttcattgttcttgccctcccactcccctcagccttcctagctccctggagaggggcctgagctcagggaaagtcaataaaatatattcttgaactgactgatctttgtcattttcatgaagtcccctgtcctcattctgtctatattcactggagtcaatacttagcaatgccctcaccccatccattccattctctaaccaattatacaggaataattgccaaaaattaaaagactaaccccaattgaattggaatctggctgtttcatggagaaaacagttaaagaacaatggaaaggacaccaaaatactcagggaaccctaaccctatctacgtcatggttttctgcaagtcataaccaccccctctgtgttttgctctcttttttccttaaaggagcatatagcaaccctcttcccacctgttctgcatgagcaagttttcagcaccagtgtttgctgtaccaaggaaatgtgttatcattcagacctggcttgaaccagacagttctaacctcaatttcccccaaaaagaatgtgcccttcctgtacatgttccttcagcattaggggacaattgggaactctgggcaggtggggagaatgaacacaagggcaaacagcttgaagcaatggagatgcagataacagaagaaaccacttgggtaccacacctgctatgccctatgcaaaatgcaagacaactacggagattcagcagttctcagcaggcagggcacagtggcccacacctgtaatcccagcactttgggaggccaagacaggtggatcacctgaggtcaggaattcgagagcagcctggccaacatggtgaagctccatctctacaaaaaaaaaaaatatatatatatatatatacacacacacacacacacacacacacacacacacacacacacaaattagccaggcatggtggcgcgtgcctgcagtcccagctatttgggagactgaggcacgagaatatcttgaacccgggaggcggaggttgcagtgagctgagattgcgccactgcactccagcctgggcgacagagcaagactctgtctcaaaaaagaaattctcagcggcccctcttcctttctaacccactctcttccattgacaacctggctcagggactgccatctctaaatgtgaactaacattgtcccacaaaatctgtagtccaaagaaaacaaggcaaggccagaaagaaacaaggccatggtaaacacagtttcccccgatgtggaacagagatgataacagggtagccatcccagtttgtattgagtttttacataataagcttccaaaatttggtagctattgttttcttgtttcattgttgttgttgttagtgttggtttttaccccttaacacctacagctgtgagatttgagccaagtaattaaccactctgcaccccatctttcccgtctgtaaaataaggaaaataacaagaacccaccacgaaaggttcctgggggcacacaaggtaatatatccaggtaaagcccttagcagactaccaagctcatacaaagggctgtgcaagcactgccttttattaaaaaatgtcacgccgggcacagtggctcacacctgtaataccagcactttgggaggccgaggcgggcagatcacctgaggtctgaggtcaggagttcgagaccaacctggccaacatggtgaaaccccatccctactacaaatacaaaaattagtcgggtgtggtggcgtgcgcttgtaataccagctactcaggaggctgagacaggagaatcgctcgaacctgggaggcggacgttgcagtcagctgagatggcgccactgcactctagcactccagcttgggtgacagagcaagatttcgtctcaaaaaagaaaaaaaaagaaatgcctccgggagcagaaaaaggacagggtaacaatagagggccctgcacttccaaaatgatgaggactcttccaggtgtaagagggtggtggcatccaatttctgcttcgtagagtaaaatgattttgaaaatctggatcaagatataaaaaggctgccacatcccatagagaagaaagaaatcccagcacatagcggagtaaaataaagtaacgatcattgtgaaacaaactcaacccacacaccattcctacaaacccgggagaagggtctcatgaaaaggaaattaaacaaatggaggacacgtttgatgtgcatggttcaagtcacactttgttctctgctcctagtagacaaagtcagccaaaccctgattaggggagaggggaagagataaaatcagagatgcacttcacaaaatagtggagtcccagtctgtccacgtgacccaaaaaagagtgaacaagagcacagggagaacaagaagactgtggaggagtgggcttgcggggtgcacccgtaccctgagttccgtgatagcagcagcatgaggaattctgtgtatgcgcgcggcggcgggggaggcaggcgtggcccctgagacgccgcatccagagatctgcctctccattaactgtgtcaccttgagcaagcagccgactattgccagagcttctgtttctttaggtggaaaacaaagagaataattccttcccctcacagcctcctagagatatgcagggaatagagctgaggagtggatggaagggcacttcaaaagcgaaagcaggaagcagcagcaaggaatgtgtattagtgatggaattatttgagaaggaacaagagcatatgaatatgtgtgctttggagtggcgcatgtgtgtgtatgagagagacagagggagagaatgaataggcgtgtcctcccaggattcccccacgtcaatgagtgatggtgcagtgtgcgaatgggtgtttattcaggggagactgcatagagctgtgatcactgagtccaggcaaaggctggttgcaggggagaggcatagcagccacagttgtgggtggaagctgacaaaacagagagaatacaggctctaaacagacagggggccaaaaccaaggcttctcctccccaagccgacaccccacacttcctacatgtggtggctgcccacgggctggaagacagtgcctctcccatgacccctcagtgcatcaccccacccatctgagcaacaggtttcacccagaagcagcaaaaagctacggcacttttgacatttaataactaagtaaatagctgtagaaatgaaccccgcccatccttccccacccccaagccaatgcaacagttcctgaagctaatgtttctctcctcctcctgtcctcattttccttttcacctcttcctactcctcctccttcttcttccaaataaatcacagtttggattaggggcaagagtagtggtgggtgattttgtttctccaacgtccggggtcagaggatgcagggtcagaggcacgaatgatgcagacaacacacactgtgtacactcactgccattctcgctttccctttaactcccacccctccccttctacaggaggggctgggaagggatttgtgtttctggggctctggggactgcagtccctggggccatctgggagtgattagcctacagatttcaggtagctccagccacacgtgcaacccacatgacacccgctaattccatacccacagctctccttctccaaacaaacagcagcacggtttgcagaaagaagaaaatgccttcccaagaggagctgcagagaaaggccaggtcataatcgtctcgtaggcaccaactccccacaaccaccatctccgcccaccattcattcaccattcagccacaccaccaccagggctcatctgtgaaagggctgtgcattgaacttagaaaagcaagcaaaaaaaccaggaagaaaaaaagttattttcattgtatatttgggcagcaaggtctgggggttttagaggtcctgatatgttaataatgatttcagtttgcggtttgattgttttctcaaaacctgtaaatccagaccagaaatgtataaagcttgcagtctgaaagctttatatccatcactacaaatattctccaaaggaggtctacaacactctttcttatagaaggaagtcaaggccaggcacggtggctcacgcctataatcctagcaccttgggaggcccaggcaggaggatcacttgagcccaggagtttgggaccagcctgggcaacacagtgagaccccatctctactaaaaatacaaaaaattagcagggcatagtggtgaacacctgtagtcccagttactcaggcgactgaagtgagagggccacctaagctcaagaagtcacggttgcagtgagctgaaatcacaccattgcactctagcctgggcgatgggaatgagaccctctctcaaaaaaaaaaaaaaaaatcagagggcaggaaatttatatgaaggtaccaagacaaggacagatttccttgtaagtggcataaggagccatctgccagtcacatttcaaagggagctttaaggacattccatctaagtgatcaagatgtcccactgtgtgcctaatggctgaaattctaccattaggtattcattgctttggctatattttagcattcattccctacatgaacgtttattcagcagagtctatgtggcacacagactgaggatacaaagaggataacactacgtgcttttcctcgaggagatcacatttcagctgtggagcatatatacacaaagacagcagcacaatagaggcctgaacaaaatgttataaaaacacagagatgggagccaatagcttttcctggggagtcctcaaatcttcacagaggggttagcatttaaactagatctctaccccttatttaagtctcactgcctcttagactgagaacatatgaagccttagtagtcatttactccatagtctgaataagcctcacatctttcccaaggtaagataggtgcgggcagcttttatctgggagagacagctttccctgaaaaggagagttataagaaaggactgaaagaaagccttcctagtatatgaaaaagaaaagtgaagatgaggtatagcatataaatccaagatttttcagaatcaagagagaactgaattcttttctctgaacccattcttttattttattttaatttatttatttatttatttatttatttatttatttatttattttgagacagagtctcactctctcgcccaggctggagtgcaatggcacaaccttagctcactgcaatctctgcctcccgggttcaagcaattctcctacctcagcctcccgagtagctgggattacaggcatgtgccaccacgcctggctaatttttgtatgtttagtagagaccaggtttcaccacgatggccaggctggtctcgaactcctgaccacaagtgatttgtccccctcgggctcccaaagtgctggtaatatgggcgtgagccaccgcgcctggcctgaacccattcttaagtctccaaaacaacttcactagcacttcctggtttgcctgactaaatatcaaaatgcttcgagcagaagtgaagttggagtggcaaatcccagagacaggagaagggaataggtgagtttgtattctatcctctgcccagactgtgcagtccacttggctgaggatcctataataacccaagagttggctgaagtaggccttgggcctagctgagctgaggaaggtgagcttagaggcaaatgtccccactgatatcaccctgaagccctgctttcctaaaacctaagttcctggaggagagtcagaaaccagagaaccatttaagtgccaggaaaatacaaagcaattagtgacttttgctttaggcagaatctaaagaggaaaaagaaatctttgagcctcatgaaactccacctccctgggcctcttccggaaccacaatgttcagcccactcagtgtttggccaatgccactctctcctcccccagaacatttctttgctcctggaaaatcatctggaaactgtcatcaccactgtgctggttggcagatgtcccccaaagagagagtgaagcgtaccacacactacaaggcatttctgggcttggaccaagaaggggcgagggcggagaaagaagatggcccagtcaaagggcaacacagcatcagcagggctcctggggccaagaggaaagagatgggactgagtctgccaccaagccaggagcttggggtgccactccttacctgcgctttacctgcctccaaagcaccttgatggagccgcaaggatgggaggcagctttctgtgacctgtgagtcgtctcagggaaatagaaggggaatccatgaaagaggcagcaagagtctcagaacattatgagcccagaggacagagcagagttcacgtggacagaggctggattctgcgggaaaccagacctggagacaacagcagagatgaaatcttgtctccttcagaagtttaggcacattgtcagccctcaggcaatattcactgaattgatttattcaaaaatcagaatgatttgacgttgggctaaatgggagagacatgacaagtgacagggaaagacaggatggaaaggacatggtgtctccaccacgttgtacttcctctacccagaactctactctgtcatctggagtcctagaaagatttagatgtagccaccccattccccccatccctgcccagcctcgtgttcgtccatactttgcaaatttgcaagcacccgcaacagcctgctttgccgcccatgatacagcatatatttaatatagttggggttcaaactaatgctctactgggagctccctaggaaaactctagagccaggtccctggggagaagtggaccctggaggcgtggggatggggtgaacgcctgggtggaatatctgagcaaacctactctgcctttctgtccaatcatacggtagaaagcataccttccaggtacagtatcaacccctccgtcagggttagacaccaccttttctcctggctgctgaggaaaacatctcaacctatgagatgtctccactgctccaagaaaatgagtatttaggggaaagattaaatgcccatatacttgaatctatagtgaccctacccctaaattatactagtaactgtttatctgtctctgctttgcctgtggatattaaggcagatgagacaaaaagtcttcttttgccaaccaaagctaacagtttgcgagctttagggggaccccaaaggggaccagtttctgtaatacagttgatgccttctgtctgtgttctgtcaggattccctcacattttagccaacctggaaactagggaagaaaaagtaacaggttccagtcctagaactctgtggaagaaatcaacctgccctttctcgtgggggtaaacacatgtgatccaaaagatagtgacaggaacactgttatattttccgggtcttaatgatttggaaggggaatactgtcccctctcctaggccagtccaaatttcacaacccatccggaaaacaaaaggctgaagacagaaaaagaagacatttactattccacttcttccttttacatcagtgagagaaagggccttgggagaaagatggcacagagagaaacaaaagaaagaaagaaagaaaaccaaaaatctctgctttctcaaaaatccctggtctgcctatctaggctgggagagaccccgagggcagcctgtctctcctgcagcctttgcagtcagcgacaggcatcatgaaattaatttgaaataaacaatgacaaagcaggaagctcaacgggtccctgagttgctttgggcccccactcctccccgaagcccctgggctgtttaacaaagccgtgggtccgcctaccccaagcactttttgtgacgtcacagctccgaggaccatccgggggctttactctcgcggaagcccaaaagttggggtttgacctcatgaccttggccttcccggggggcgggaggccctcgggacaggacgcgctgtccccggagtccggagctcaggccagtggcagtcgacccagcccccgagactccctcacgccgctccaaaaccaaaacggagcccaacacgaagctgggtgaagccgtagcttgcaggagccagggagatgcgctctgcccgggacttcccgggtcctgttgagacggaaaggatcgcagggaagacaggataattggtctttaactctgaccgttaccttcgaaattgcaccttacaagcatgtcctctatttccgtggcttgatggggacactttctctgattaagatccggaataatcacccacccaatgggatctcttagagggaagcgctggttagaatccctccaggctgagatgcaatcatcgccattgagcctgccctcccctagggaaaccccacaaaaccatcctgagaatctcagccctctttggtcggtacctgagactgcatagacctaaactgaaaggtgatcgaaggggaggagcagttgctcgtgcggaggaagctcttggggccgaagtggccccggccgagtatgtcgcaaaggaggcaccactgcgttgagcgcttactgtatctttacttttaaatcaccaaggcaaaatcaccttcagctaaaaatgcctgaaagactttttaaaatagtgggagtgggcgttagggggaagagatggcctaggaaattttccgcagggcgttctagggatgagttgagggaagccgcatgacgcgcggctccccggtgccacagctaaggacagatattttcgcaaaacccagaatgaaaaaagagcacgctccctttgggagcgctgtccctttgggactggggccttccactcccacccctcctttttccctgatcggctccgcagctccacgacaagccagctggtctggtctctgacttgggctccggtccgtacccccggggcgccctgctgtgttacagccgcccgacgcccccagacccggccaggtcaccagggcagattggaggttcgcgccccctcacccgacacctcccgtccacctcatctttctttttttcgaaaacaggaaagggaagaaaactgaaacgggcctcttggtctgcagttttagcggagtcgggattccacagccctgagtggcacatgccggtcaacttcccaaagtcgggctcccgtgtggggagaaatacacacgcaggaatgcacaagcatcgcgtgttcgcaactgtcgctgggaggtctggcggctgtgatgggacatgcactcactcgggcaacacgtccacaggtgacatctattcgatcagtcaacagatatttattgcgcacctacgacgctatctggtactttccttttccccttagctgttgctgtccagcccagcgccagtccagagacgggcttaccggccgctcccttccacaagaaactcgtgtccggcgtgaagagcggacgataaacactctccaagcccagcgaaatgtactaattacaggagcggctgggagcccgcgacacggggacctgtccctccagggataggagtcttctacctgcaagggacccggcctggggaactggaatagacaaggggtaaccccttctcccatcacctctaatgagaacattgtccggggctgagatatttgggggacgccgctgctcaccccaccaaactttccctagggacagaaaagcgtccctaccgaaaacggatttaaacaccgtccccacttttgctaaggaagtttggatagggaggttgtggtccttaattcgccaggtaaaaggaaccccatcagctcgcatccctcacccccatcctgagcactgagtgtttgcgagaaactcgccctgcgccagcaactctgggctccggtctcagctcccgcgtagacgcggaggagagattggcggcccccgctggggaaattgagcccggcgccggtccgggacgtgcaagagggggaaagggggagatcccagacctcggtttcccgagggcttccctggggagccactcgcacctctgtgtctccgctcccggcggcagacctcgcggcgcttgctcaagagcgggtatccgaaagcacgtcccgaacacggagaagcgccctccgtctcctgcctcgtgacctgcgccctttccctccctcaccgcatcagatggaggaccctggctcctttcgcccctggcaaaatgctctagccaacactgggtcaacagccttagtttccagatctgtaacctgaacatcaggagcgggttcctttccttctacctgtgtctgaggtcctctggtcggggactgcgcgcgtcttcccaggtcagggaggaggggtcggggcgacctgagaaagacacaacgaagcgaatggagcccctgaatggggaaaggggagtggacaccaggaggcccctgcagaaatgcaggaccgatccactcgcgagctgacaatgccacgcgctagacttggcctgacggtggcaacgcttggcacctgggggataggggccttctcctggcctcagtccccaaattctgcgcagaatagaacggctggcatctcaagtgctcttttttcacccggatctctacagacacaagttccctcactgagctgcgcagaggtggatccgcacaggagggaatatcgcgtaggaattcctgcaaatataaatctcagcagcaaagcagtccagattgactggaacacaccacccccagccaccaccatccaagttttccctggttctcggagttggaaacagtttctgggcttttggcgccccctctggatacagatgaaaactgcagtccatttttaagtcgcctgttcataagttttcaggaagatgtaaaattcaaaaatgcttgcatcaaatcaacgggaaatgtataaatccccgtcgtttatgatgtaaaactctacatattagtatcttattgcataattgcattaaaagtatatttatacatatacgtatatatcttgacatatatttagtgaaatattccaaaatatcttaaagtcatagccctcttcactgactttattccagcaaacatggtaattacaatatcatacaactaagtacagacgacctggctaaaatgtctgcccgatggtctccgagtctcctgaatcaggtgtctgagaattacacagttatactgtacacacaatgcccttctacccgggacacagaaataggtccacactacgcggacttttttctcctaggaaaggacgatgctgttcttacactttctgaaagtaatcacagagccctggatacgaagctattgtatgcaaatctcttaaatttgtaaacgagctatagggcaccagaaacatcccatttgaagaagttacattcgttaaaaaaaaaatgctgttgaacaaggctgtaacttactaccttatgaagagttccatttcctataagaaatgtcgggcttcttccgaagacaacgagagaaaacaagattttaagaaattctcccggaaggacattgatttggatcttgtgatagtgtcctcacttcgcaaattagaaagggaaaaaaaaactagtttttattatgatgtgggccgattcaccacaacaataatttaattgaggcgaatttttgcaagagcccaaaagggtggggggggggggggagtttaaaattaagagtttcccaatgctgtgcgtttatttgggattctgaaagcacagaacccgcaagcgaccaagacttttcttctatcccagagcagatagctccgcacttacccaacctggctctaagcatttcgtgtaaacacaaaggttgtgctcaaatcacacttgaaatacatgagagacaccaccaatgcctcccccagaactcccaactacatgcaggtctgaaccgaccggactagagtcagaagcaccggcgcttcaccccttcaggtgtttcgtaaatgccagcaaaagcaggcaagcagcatgactccgccagagtggagcgttttgtctgcggtggtgcccatttgtttggtcttttacaaaccaagtgaccggcctgggcctcgcggcccgggacagccgcattggcaaacttctatctctcaaagccagagcagttagcaaactctcccccagacagggcgactcggctgacgtttttgacccggccaggaggcaaagaccaaaacgtcagagcagtagccctgttactgaggagcgtcggcagggtcgcgggtagagggggctggagaatgacttgtcagagctcaaggtcgatgtggcgcggggcggcctcgagagcgccgggctcctgcgtggccacggccgccgctgccaaccttcgcggggacttagctttgctttccattgactccctttgcaaaagcgcagcagaatcctgaccagccgcaccagccccggcgaacccgagcatgttaatctatttatatggattattacggaggaacagcgggcgttgagtcaccaaaacatttgcttcaaaagactatttctaagcacttttgcaggcaggcaggctcgctccaggcgcgtaaactcggctacgcattaagaagcggctgcttttcgaatactgcaaactccagctaagtccccggtgccgcggagagagcagtgaaaagaaatgtcggaggtgggggtagatcctagtctagacacacacacttgcgcgcacacacacacacacacacacaagattcgcgcggagaaggcactaaaattctggcattccgagagtacgacaaacttacacacttggaagtcccgggtcccccgccttccccgcagcaccccccgcccccccaccctaccgtccgccctttggctgcgatcccctcccctctcctcccctcccgcctcgtcacccagcccagtgccacaatcctcctccctccccaaaatcgggtccaatcagctgcctgccaaccctgggactgctgtgctgtgattggcgggtggctctaaggtgaggcggagtatttattaaagagaccctgggctgggagttggagagccgaaagcggagctcgaaactgactggaaacttcagtggcgcggagactcgccagtttcaaccccggaaacttttctttgcaggaggagaagagaaggggtgcaagcgcccccacttttgctctttttcctcccctcctcctcctctccaattcgcctccccccacttggagcgggcagctgtgaactggccaccccgcgccttcctaagtgctcgccgcggtagccggccgacgcgccagcttccccgggagccgcttgctccgcatccgggcagccgaggggagaggagcccgcgcctcgagtccccgagccgccgcggcttctcgcctttcccggccaccagccccctgccccgggcccgcgtatgaatctcctggaccccttcatgaagatgaccgacgagcaggagaagggcctgtccggcgcccccagccccaccatgtccgaggactccgcgggctcgccctgcccgtcgggctccggctcggacaccgagaacacgcggccccaggagaacacgttccccaagggcgagcccgatctgaagaaggagagcgaggaggacaagttccccgtgtgcatccgcgaggcggtcagccaggtgctcaaaggctacgactggacgctggtgcccatgccggtgcgcgtcaacggctccagcaagaacaagccgcacgtcaagcggcccatgaacgccttcatggtgtgggcgcaggcggcgcgcaggaagctcgcggaccagtacccgcacttgcacaacgccgagctcagcaagacgctgggcaagctctggaggtaggacccggcgggggcggcgcggcagggtgggcatcgcggcggctgggggcgctggtcagggctgatttgccccgccccgcctcccatcgcccgggagttgccgttccgggagccggcgggatggggttgggagtgggaatggggtgtaactgtggctcagagtttgacaaagttcttgggctgctcgcggggacgcggaggaggggggtggtaagtggaagaggtgagggaggtagctggaggatggacgaagactggtgggagacggaaggagggggctgccagcctgctctccagtcgcctggaagctcaatcggggcggggaagtgaaacttgcctccctcctacccggcctcttaaaactgcactctctcgtgcagccccactgtccacggagatggggcaagggagaaaccgaggttggaggagacccttggcaggaactgggaggcgggaggagggaggctactggaaataggtgggagtgtatggtggggggtgagaattggggaccttcttgcagcttaagtaatttgggggaaagttttcaaagggggttggggttgggggcggtaagtcgagcagcaaaggcgtttagggggcagcaccgggagtcgttttcatctccagcgtttccaaaatagaaatagaaggggaggggagggagggggcggggagtgaccgctcaggtcagactgcaataacttatttatttatttatttttaagaaaagttatgagctgtggttgcaggcaggagggaagatggagttgtgtgcagaggaagccgagtggtctgggtcgccgcctcctccccgccgacctgacagtttggcggatttcactgacccctctccctctttttctctgtgccccccgccccgccccgagcagacttctgaacgagagcgagaagcggcccttcgtggaggaggcggagcggctgcgcgtgcagcacaagaaggaccacccggattacaagtaccagccgcggcggaggaagtcggtgaagaacgggcaggcggaggcagaggaggccacggagcagacgcacatctcccccaacgccatcttcaaggcgctgcaggccgactcgccacactcctcctccggcatgagcgaggtgcactcccccggcgagcactcgggtgagtcgcccctcgaccccaccggacaagctatctccgtcccgcctggcacaccccctgccctccgcctgggagattcttcgtggggactttatgcttcccgggagggacacactgccctttgcgcccgtcccgctcccctctctacccagagcctaagaggcatccaaacaacacacacacaaacacacacaccccaactcaatcccagcatccgaagagattaacttttttattgggaggtaaaatgcccttaacagccttacaagacctctcccttcttctctgctcccccaccccaaaagcacacacagggctcttacacaagtagcaattaggtcttccggaccctccgggccccagaccctcccctgataaaagggggctgtccagtgtgtaccggcgggttaatcattgggcgacttatctccggtgcagcgcgcctcttgcgcgggtgcgggcccttattacactttagcagcgagggagggtccccggagggtgcctaagactagggcgtctgcacagcccttgttgattttctcgtgcttgttcttttattgtccacagggcaatcccagggcccaccgaccccacccaccacccccaaaaccgacgtgcagccgggcaaggctgacctgaagcgagaggggcgccccttgccagaggggggcagacagccccctatcgacttccgcgacgtggacatcggcgagctgagcagcgacgtcatctccaacatcgagaccttcgatgtcaacgagtttgaccagtacctgccgcccaacggccacccgggggtgccggccacgcacggccaggtcacctacacgggcagctacggcatcagcagcaccgcggccaccccggcgagcgcgggccacgtgtggatgtccaagcagcaggcgccgccgccacccccgcagcagcccccacaggccccgccggccccgcaggcgcccccgcagccgcaggcggcgcccccacagcagccggcggcacccccgcagcagccacaggcgcacacgctgaccacgctgagcagcgagccgggccagtcccagcgaacgcacatcaagacggagcagctgagccccagccactacagcgagcagcagcagcactcgccccaacagatcgcctacagccccttcaacctcccacactacagcccctcctacccgcccatcacccgctcacagtacgactacaccgaccaccagaactccagctcctactacagccacgcggcaggccagggcaccggcctctactccaccttcacctacatgaaccccgctcagcgccccatgtacacccccatcgccgacacctctggggtcccttccatcccgcagacccacagcccccagcactgggaacaacccgtctacacacagctcactcgaccttgaggaggcctcccacgaagggcgaagatggccgagatgatcctaaaaataaccgaagaaagagaggaccaaccagaattccctttggacatttgtgtttttttgtttttttattttgttttgttttttcttcttcttcttcttccttaaagacatttaagctaaaggcaactcgtacccaaatttccaagacacaaacatgacctatccaagcgcattacccacttgtggccaatcagtggccaggccaaccttggctaaatggagcagcgaaatcaacgagaaactggactttttaaaccctcttcagagcaagcgtggaggatgatggagaatcgtgtgatcagtgtgctaaatctctctgcctgtttggactttgtaattatttttttagcagtaattaaagaaaaaagtcctctgtgaggaatattctctattttaaatatttttagtatgtactgtgtatgattcattaccattttgaggggatttatacatatttttagataaaattaaatgctcttatttttccaacagctaaactactcttagttgaacagtgtgccctagcttttcttgcaaccagagtatttttgtacagatttgctttctcttacaaaaagaaaaaaaaaatcctgttgtattaacatttaaaaacagaattgtgttatgtgatcagttttgggggttaactttgcttaattcctcaggctttgcgatttaaggaggagctgccttaaaaaaaaataaaggccttattttgcaattatgggagtaaacaatagtctagagaagcatttggtaagctttatcatatatatattttttaaagaagagaaaaacaccttgagccttaaaacggtgctgctgggaaacatttgcactcttttagtgcatttcctcctgcctttgcttgttcactgcagtcttaagaaagaggtaaaaggcaagcaaaggagatgaaatctgttctgggaatgtttcagcagccaataagtgcccgagcacactgcccccggttgcctgcctgggccccatgtggaaggcagatgcctgctcgctctgtcacctgtgcctctcagaacaccagcagttaaccttcaagacattccacttgctaaaattatttattttgtaaggagaggttttaattaaaacaaaaaaaaattcttttttttttttttttccaattttaccttctttaaaataggttgttggagctttcctcaaagggtatggtcatctgttgttaaattatgttcttaactgtaaccagtttttttttatttatctctttaatctttttttattattaaaagcaagtttctttgtattcctcaccctagatttgtataaatgcctttttgtccatcccttttttctttgttgtttttgttgaaaacaaactggaaacttgtttctttttttgtataaatgagagattgcaaatgtagtgtatcactgagtcatttgcagtgttttctgccacagacctttgggctgccttatattgtgtgtgtgtgtgggtgtgtgtgtgttttgacacaaaaacaatgcaagcatgtgtcatccatatttctctgcatcttctcttggagtgagggaggctacctggaggggatcagcccactgacagaccttaatcttaattactgctgtggctagagagtttgaggattgctttttaaaaaagacagcaaacttttttttttatttaaaaaaagatatattaacagttttagaagtcagtagaataaaatcttaaagcactcataatatggcatccttcaatttctgtataaaagcagatctttttaaaaagatacttctgtaacttaagaaacctggcatttaaatcatattttgtctttaggtaaaagctttggtttgtgttcgtgttttgtttgtttcacttgtttccctcccagccccaaaccttttgttctctccgtgaaacttacctttccctttttctttctcttttttttttttgtatattattgtttacaataaatatacattgcattaaaaagaaagtggccctgtggatttattcacccagttctcctgttggatgatttggcaaatttgagcacaaaagacattgtggagtgctgattgctgtgatgtttttgttttttatcagcacctttggcaatcctagaaaacaagctgaggaaaagactgtatctccaaaaatctaggcagaaaaatcttgaaaagtgccactccaatagatcacacagaaaattacatgtcagtagttgctcactctggcaaaaatgtttgttgtggttttcatgacctcatgcttcagggcaaaagctgtcccttgtggaggtcacagggaatattagacctgaaatcaggagcttgtcagtagacagaatgccagaggggtgacttgcttatctggttttaatatggcaaactttccgttcctatgaacacatacccaagaaatggagtatccacttaaaaagcaaaggaagccagagaaaatcagtgtctacagggaaccagagagaagcctgtcgtattaacccattaaatgattcagagccttccagatttctctgtagagacaatgaaaggggatgatttttctgctccctccagtttaactcattctaagcagacgcaaagccattgtagaagaaacaagacctaatcctgttttccttggccccagttagatggggagtttccaggttcagagaaacgttcaggtcatttttcattaaatagatgaaatcactccttccctcacatgggcacacctccccatccccactcccacaccccagatgattggagaagtgtctctaaagagtcagtcaccttcaccctctcaggctagttttactactgggcctgtgtctctggcagtcttaaccagagtccaacctctctggcattacctcacattgtctgtttctgcttattggattcctggctgacatcccacaccaggaacatggcaaccaggaaaatggtagttatcaaatcgaggcaacattagtactcggcctcctttgcaaattccttcgacaaacattgattgagggcctgtgatctgcgggggactgtgcaaatccttccctaccccttcagacatcaaattctgttccttgtttgtgacatagccttccatgcgctgaggccctcccttcttacaaaatctctattttttttttctcttgccaacactcacaaagtcctttttaaaagtctctgtggtgttcactaattcttgcctaccttattcgttctaatccctttgtctattaaaatcaacacacaccattccactgcgactacccccttccctagcaaatctgtatgtttgctagactgttctcccttccagaaatatgctctttttcccagtatgtggcctttgccaggacttcttgaagccaaaatattctgttcggacataaacttgtgaagggaactgaagcaagttgttttgctttcccgtgcctcactttccccttttgctgagtatgtttataattcctcctacatagagcagggttgttaatagaggagattttagccagagcaatctgggagttgactgcattggagtctcctggtctgtacagcagtccccctgcattagaattcctgggagtaatagccaggaaaaagagtttcataagctccccaagtggctctgatacacagtaaaatgcaagagacacaggagtgctgggagagaattcctcagaatcccgctcacccccatatctatcagatctagtcaaagcccaatatcaccagattataaaatattttggaggaatttttagtctaacaccagaagcacagagcttatcaccctggcaacagcaacacattgactggaaacctaggagagtcctccacaccggaaagagtttgtatgtagatccagggttatttgtttgtttgcacttaaaataaaaccttttcttttctaaccattttaacaaaactgaaatttttagcaaaagggaataaaaataaactcatttaagaatcggtcttttgctctattattaaattagagccatggggattcactggagctgtttgactttcccacttcagctccatcccatccctttccttccctgatttccaaaatgaacgtttgtgaggcagcatggtggcacgtttatattaaagtaatcgatgaactatcactacagccagagatggatttactatgaagcaaacaaagctcaagcttcagcacctctcaaaagcacaggctccttttaaggctctggacttattcttgaatttttaaaatttaaattctttttcttaaagaacttcgcctcaaaaaaaaaaaaaaaaaaaccataaacttcatgccacacaaaagctggatctgcccctgatcacacctattggccagtaaactgaagcattagaggctgccatagaagatagcagaatacatttctttctgttctcaacagtgcctgaaacatagtaggtgctaaacaaatatctaccttccatcgtatccatgaacgtgacggtattgccaaagaacacactggaatctctgcaataacactctaccacttgtccttacacagtttctcatccctctgagagtcaaatgaatttttgcttctcaaatgacattcacttacgggcataagacaggtttcttgcacacaagaaatgcaatgacctgccctcctattctttccctttcctcttcctgctcattcctttttttcttttctttgccatctctcctctgcattttctcagtctccccttgactctgacagctgaaaactttgctgggccctgattgagcttttcctcttttatcaagcacagactagaactattttactccgaatttctggagaatcgttcttttttgaccagatacaacatgggccaggtaatctcagaaaacaaccaggctaaatttggggcaatagttccttgaagctattgttagacatgtcccttgagcattcaggattttatatggaggttcatctgatcaccattatttcccactgtcatattccactctagaattattcccactcctcattcttgccataaatatttgattaggacgcaaccatgaacaagaaagactgcctcatggagcttacattttcatgaagaggaggcgggcgcaaataaatagtacttcctggtctttccttgtttgcatgccataggggaaaaaatgcaactcattagagccaactgggagaacaggcacagggaaggaggagttgatggatttggaaatggttttggtgagaacatgctgagttcatttttcctctcctgatcttcatctctttttcagtgatataaaattgactccatttacataaagggaacccactctatttttaccttagccactccctcctgcccctctgccccaccccccagtaaccctctattagtctctctacctcttaatgaaccatggattcatggatctcacaatcctctttatagcagagatcccaagagaaaaatccagtccctagtatccaaagggccttttgatctctacagatttggttaatgtaccctgcagatatgaggaaggaatcagaaatgaggaaggtataaagaaaggtcttttaatttatttgtgtttgcattgcaaaaatctcttatacattatctcagctattgaatactcctccattgcctccagaatacctgcatggattgagagctcacatccaccatggagatctttaattgtggaaaaatcttacctctgcagtttccacgcgatggtccaaggtggcccacctccacagcagaacagtgtgtcttatctttcttccaagtgacagcctttcaactatgtgtgcagttttaaagttttcttttactcttcccaatctaaacacttccaatacattttacatgtgatagggttccaaaacccttttatatttgacagtcttctttgaatgtacttcacttactagtattctcaaatgagtgcactcagatttttttccaggactccaaatacttggctaacacggaagacaaatagactcatcattcttgtcatcagaaatcatatttctattaatttacattaaaatcatattagctcttgtagcagccaagtcacccagttatgttacgttaagtaatttcttacctatcctgtaattgtgcaattgatttttcaacccaagttttacatatcctcctgttttgactggcgtatgacttatacaggcccaacggaagaaaaaaaaatggcaaagggatttgcattattgagcccttactttcgcagtcactgtgacagatgttttatatacatgatctcacgtaatctatttaacaaccctttgagacaggtattcttattacagctttatgaagaaggaaactgaggctgagagattaagcaattgacctaaggttatgtgactggtaaatggcataggcaactaccagaggctccccccatcctctcagttttcaaaagaaaattagaaatagagttcataacgggaaagaaataataaatggagaaagacaattcttatgtggtaaattatgctacaggaacctcttcaaagcaaaatctgaccatatgaccccctgttcaaaacctctcaatggctacctatccttggaataaaatccaaattccttaccataggattcaactgccttactccaggagttggtaaaccgcagcccacgtaccaaatctggcccacctcctattgttgcagataaagttttattggaacaaagtcatgctcattagtacagattgtctatgtgcttttctgttccatggcagacttgagtagttgaaacagagacaggagccaacaaagcccaaaatatttactagctggccccattacagaaagatttgctgactgctgccccacacaaggtagcccttgcctaattctatgacttcatctgttgccactactctccttattcccaatgccccacccctcagccttctttctcattctcaatctctcaaactctttgctatttcagggcctttgcacttcctactttcgtgacttaaacaacctttcatcagagtttccctgttatttctttttcatctttcagatatcagctgaaatgggccaaagggccatttggtccaagggaccttccctgcccatcctggatacagtagtccacactgccgtcacctcaatcctcactaacccattattccatttttgtaacaccatcacttcctgaaataatctttgtcatttacgtgtttgtctcctccagctaaggctttgaacgtcgtcttgttctcaatttatctccattacctgggaaagtgtttgacacataacaggagctcggtaagcacttattgatgaattcattggtgtattaagttgctgtattctcccagatcctgagatgggaatcaagtattaggggttagaaggcaaaaaaaaaaaaaaaaaaaaatcaattactccttaattaaattatcaattaaatgaacatttgattaatgttcactatacgccaggtagcagttgggcttcaaaactaataagataaggagctcacaaaaagaagggtgaagataaagacattaaacagacaagattgttgagcgttgagttagagatgtatataaagaatgcagaggagagggaggagggggaaattgtccagctaaggaaagacactaaggcacagaggagggactgtgcaagaacatggaaatattcaacaggctggtgctttggggcaattgtaagttggttcactgtgactagtattcgatatgggtagataaatagcagaaaattagttaagagataagcagaatcatagtgaactttagaaggatttgaaccaggaaatggcaggagttgttgtgtgtttcaaaaaagaggacattagctgggtgcggtggcttgcgcttgtaatcccagctactcaggaggctgaggcgggacgatcccttgagcccaggagttcgaggccagcctgggcaacatagcaagaccctatttcaaaaaatatatatacaaatttaaaagtggacattgttccccctgctccaacccagacttttgactttgctgtcaaaatctaggaaaccaggtcattaaggagaccacttaggagtctctagtttagtccatcacagaagagataaagcctgagccaaggccaaggcagtgggaataagaatggagaggatgggatggctaagagaggactcaatggctagaagtgatgggggttgagaactggtgatatgtagactactcagaaggtgacatcaaggctaatttctatgccctaccttcagtggcagaggaagagatggtgtcatttgaacaaatcgtggaatataggaatgtagttggacatgcttagtagtcagttggaaatacatgtaacctatgtggattgtgatcaaaatgcaactttctacttgccttcattgactctttggattttattgagaagctggatcttcccttggccctgagtgttcactggaagtaggagagggggtgggacaggagggaggcatgaattttcctatcattctcagaatgatagggaaaaaaaaaacttctatgcttactttttttctattattattattattattattattattattattattgagatggagtcttgctctgtcacccaggctgaagtgcaatggcgtgatctcggctcactgcaacctctgcctcctgggttcaagcgattctcctgcctcagcctcctgagtagctgggattataggtgcccaccaccacgcccggctaatttttgtatttttaatagagacggggtttcaccatgttagtcaggctggtctcaaactcctgacctcaggtgatctgcccaccttggcctcccaaagtgttgggattacagatgtgagccaccacacctggccgcttatgttttgtttaagtctcattttagtaaactgaaatgtccctccaggaaatgtctaaattggcttaatagcaaatcttccctcctcctcaactcacaaatgctccaggatgaaaacccactctggggaagagggtgattgtacacctctctgtatgttccctgttttcctctctcccactagttggctgctttttcctgtctgcccaacagagtcaaagaggatgaggctaaccggggaggagaagaaagagaaaggggtatttatatggatggtgccaaattctccagtcctagtagatggttaaggctggtattcctggtgggccaggcacctgagcagcgctgcactatttccccttgggcactttcacgaactgctcattcatgcggctgtcttgacccaggcagatacatcactattagacaggtagtttcactgcctttcccaccacagagcatgctcagaacacctccagcctctttctgtggaggtctcctcacctttgcaggccactctgctaaaaaagacccacgatgatgccacgtttgctctctctttttgatagggacccacatttggtcaatggaaacatatccctccctcacccaagaaaagtcaacacttctcacagcttaccgtagataactagattctcaaggcaagcatgagttctccatgcttctgaactgcaagaactcttttcaaagctttgcaagtgacctattttaaagccccatttactcaacctgggataatagataatacaccatacctccccagtgaagggaggatgagtatccattgatgaaaaaactcttcaaaaagcatctttacagatttcctttcccctcttggactcctgtcctgctttattgtgggttgttttttgtttgttttttgtttttttaaaaaactttacatgcagtgaaatgcataggtcttaattgtgcaacttgatgatttttgatatatgcgtacatttgagcaactaccacaccagtcaaattagagaacaaactaatcacccaagaacgtttgctcattccctctttcagtccatcttcatttccatagacaaccactggtctgatctctatcaccctagattagaacctgttcttgaacttgatatgaaagaaactatacaataggtacccatttgtatctggcgtgttttgcttaaaataatttttgagatttctcaatgtcattgcatgtatcagtagtttattcttttctcttcctaactagtactccattgcatgaacttacaagaatgtgtttatccattttcctgctggcagacatttgcactctttctagtttggggctattgtgaataaagctgatataaatctctcctggacctagaaatgtgattgctgagtcatagaatagataaacattcaaccttacgaaaaattgccaaagcattttccaaagtgcttaaatcattttacactcccacaagcagggaatgagagttacagttcctctacatcaacactcccatctgttgtcagttttcgtatttgcgacacccacttttgtgggtgtaaaatggtatctcgtgctttcactttacatttccaacactcttcttcctcattgccctatccagttcccttgcacactgtttggccttacagaattcgagagacatcagatctgatgaccctgatactcttttggaacccagatgtttatttcctttctttagataggaggagttcagatatccgtttttcttttgacttttcatttttgcacctgcctcagcactgtatgaatctagctagacccatgtggggacgtgccaagctctgtgaagaagctgattatgctggtcctctaggtccagctggtgacaaataaggctgggaattcaggagtgtctaatgtgagactttcaggctcacttacaggcagcttgggaggtggaagaaatcaagggataaggggggaaagtcaaagcccaaataaacatctggccttctaggtggcacttatgcaaattggtctaattcctggaactgtgaggagctgacccacctctatgcaaataaaggacctttagaaagacaatgtttgtgggacttctgcactttatagcttaaagcccctggaaagggtaagatttgctcctattctgaatgtcctacatctctgtaaatttagaaaagagacacttctcttcaagggtttcccaaagcagaactagaaggagtctgggtcctcattttccctcttggttgaagcccctgggtctcagaatcatcatgtgtgtgtccttcccagtcaacagatctgcctccctccagagccaattttgaaagtccctgaaatttctgaagtcctcactgaacatgagcacacatctgacctctcagtggatttcatcacccagctggcccctatgtgaacccctgcctccatggagaattcttgaaatctatcccattctccacctacagctgttttctgggatttaagggggaaaaaaaatgacatggcatatttaattctccccaatgcccctgccccttgagcccctattcccaccaagactcctttccctccaatgttcacctgtgttatctgatcattttgattctaccatagtgcaagtaggcaactatgagaaccaagcttgcacctcatgctagacaacaaaattaagacggcaggaacacaacctgagccaacagcataacagacatcagccatgcatagtagtcaatcaatagacatgagaccaaataaaatccagcttctggctagagaccagagcccacagctgttcatcaaaaccgtcctcatgggcatacagtgtggaaagaactgacatgctcaggtctatccagccgcattgcccaggaagtcataatcgtcaagacgaccaatgtttcttgctcatctactacctgacaggctcatgctagaagctagtggtacagaggtgaacaggacagagggaccccacacctagtaagaagagaccaacgttaaacaaatgatgttaataaattatggatatctatgtttcttcattaaacatagtcaagggagttaagcaaataaagagcttatggtcaggagttccctaacttctaaaattcatcatctaaacgtgtgttgcttttaaataccaaacaaaaaataaaagattcctgaataaataaataggttacctgaaaaaaagtaatatcctgatttgtacagccacttgtcatttgatcaccaattggattactctacatagcaagattatactttattactgcattagtgattcaactgaaatgatcattactattcattattgatggtgggaagtagagaaggagtagcaaattcttcactttctcagaaactctttgtctcttctgatatgatatctgcactcttccttcaagttgtcacattttcagtcttcatttctgagagctacccgacctaaaagtctctctggagaaagagtccagttgttcttgaatgagagccaatgattatgactaaatgtcttttctgcttattcagtgaatcatcctggtcgatcggtcattggaaaatgccatcttaacctgctgctgactttatgtgccaagaacccaacaaaaaacaggtttcaacaaagttgggggaacttacatgagatcgaagaaagaacagtcatgctgcacgaataggttcaatggcagttatggggcctatttgtccatgttctctgatatatttaaaaaatcattcaatatctgtttttacagtctggcttggagagtgaagagggaggaaggccacagggcacatctgatgacctccggatactctttttggtgatacccaacgagctgaggagcagaatcttgacagactgcaaccccccctcaggcttgggcccaccccacaagctgctgttgtcctgccacagctgtttccgttttttattacaattttctccgcctttcatttttcaggccaaagagaagctcggggggcccatctgttcctctcttgctcttttgcctgttcccagaagcaaagctcacacatgcacgcgtgcacacacactccacaccagaccccacaagctccttttaggacaatgaatgggaaccagaagtgaacatcacccacccagcaacactccagggacctgaaaggaaaggcggccttttgggggaggaggcggtgtcctcagaaagccctgatggaagagcattctgtggaaggagcatcggatacaggagcaaaagcttctcacgaaaacaacaggttttcttccgaggaggactttttgttttgtttctgtttttacttcaacttattaaaacaaacacacaaaacagggctcgcagtgcaaattatctcaagtccagaaaacctaagacaaatgatcttgggctgaagaaaaacattagaaactaattgatagagcaacttacccctcaagatggagtgaaacagtgtcacttttaaaacaaaaggcaaagtccgtatggccccaagttcaaagctaggtctctgaagacatggtcacatgaaagtaccaaaattgaacttttgaagactgttcttccttcattatggagcaggagtaagtctgcatgtcctgttcatttttccttcccagtgcgtctctccagagccacccacccagaaaaagctattgcagctcaggctacagttggtgccattgtctcctcacttatactgtcatccaagcatttggaaacaccagttgtcttgtttctggattgtttgggaaccaacagcatgggatcctaaggaccactctgagtcaagtgaaactttctaatttttttcaagcacacctctcctcaatggatccatctccagccacctctctggataatctgtcccacgccccattgcactgtgggatgattcacgtgggtttcatagcctgggcacaactgcattttgtggcattttgttgcagggggactgttctgtatattataggtgttttagggggactgttctgtatattataagtgtttagcagcaccttggcctgtacccactaaatgctaataacacccctctctagtttcaacaacccaatattgtctccagatatttccagatgtccttggattgaggagggttgggttggggggagaaggaaaactgccccagttgagttgatctgttagagatcatgcctttaagaaggtggcattcatgggaagccaaggtgggcgggtcacctgcggtcaggagttcaagaccagcctggccaacgtggcaaaaccccatctctactgaaaatacaaaacttagctggatgtggtggtgggtgcctgcaatccccgctactcgggatggacgtggtggcaggcacctgtaatcccagctactcgggaggctgaggcaggagaatcacttgaacctgggaagaggatgtttcactgagctgagatcccaccactgcactccagccttggcaacaagagcgaaacttggtctccaaaaaaaaacaaaaataaacaaacaaaaagaagacggcatttcagaaagggagaacaacccatgaacagtaattacgatctgggataggtgtataggaaagatcaggtgtcagaatacatatttattgcattgatttttaaaagcacattttgtctttcagccaattgtatcttagatttgaccaaatgcaagttcgttcaatatgctttggtagtttagaggaatgaatgattcttttagcttgggcacaagagtggagaggacaaggctcaggaaaggctcgaagttgtgggatggacagaatttgagcagaagacaatggggacaaacactttaagggaaagaatagaataaacaaaacatacaggtagtgaatgggagtggtggggagagagtgagaaaggcaaggttgcatagggaagctcaggcatttctggattttattatgcaaatcagagagggtcaagagaacccctgcatgagagggtggggaagtagtggtgaataattatggctgcatttcacaagatcctcagtctgggatatactccctcctattacctctccttgtttagaactttgaagacttgagtcatctcctccaaagaactggagttagtcaccattaagctgtgtgttctatgttcctatgtcttgttcctgtgttatatagctatttcttgtattttgtgttgtcattgcttcccaactgttttatacggctttgtctccttgacagcaacacttctcaagcatctggaccacaggagttgtgctttcctccctcttaggtaccacctgtagcacttagcaacctgtgcaacattgcactcatctcagagtacctggcacgtagtaagccctcaataaacatcagtggcaggagggaagaatagaaggaagaaatgaaaagaggaaggaaggaggggagcaatggagggaaggggagagggaagaaagatatcaaatgacttcttgtagaactagaaaatgagcagttctcctaaattgtttctgtcctgatccaagtactcctttgtgcccttactggcacctgcttcccaaattactagaatcatcagaaagcctaagtccaggtggccttggctttgggcctggacgtaaagatttctttctgatgacctcagtttgaaaacttccctaaatgcaacagtcacgcaccaaaagctatggcttctgtgtttccagttcttcccccacactgtagaacacacttaggagctgctacaagtaaagccagggccttatgtctcctccatccaaacactgaagaactaaggccacctccaggatgcaagtgaaggcacaccattgccaaacatgtggagggcatgaaaacaaagcaaccaaaatgggcagcctctcaccacccctcccataaggcatagccacagggattagagttgaggcaaggtctgttcaagattgcagtgggactgaagcggataactgaagctggagaaggaagacagagtcaattcatttaattttcccaacaatttccaaggtcatttcaaagggcacatgagataatgactgctgcattgtatggggccaagaattgggcttccctttctctccattacttctccaccaggctgtcataatagccttccaagtcacctcacgctctacctcccattgaccttctgtgcccctgtcaaatcaaatcctgaaacacagccctaattattcactgcagcttccccaccctcccatgcaagagttttgttgaccttctctgatttgcataataaaatccacaaacccctgagcttccttatcccaccttgcctttcccacctctctcccctctactcccattcacggcctgtatgttttgtttattctattctttcccttaaagtgcttgtccccattgccttctacccaaattctgtccatcccaaaagttcaaggctttcctgagccttgtcctctccacgcttgtcctaagctaaaagaatctttctttcctctaaactaccaaaacatattgcacgaacttgtatttggtcaaatctaagatgccattggctgaaagacaaaatgtgctttttaaaatcaatgagataaatatatattctgacacctgatctttcctatacatctatcccggatcgtagttactgtgcattccctttcggaactgacatcttcttagaggcatgatctctaacagatcaatttttgtgtttcttatcaatcctagcatagtgctggtgctatattcacaaacacacatcagtatacattcatatgaatatggaaaaatgacagtaagagtgaaaagcatttctgccctaaagaatccttatatattaaattcattaggttttatagtttaaaatgtgtacttaaatatttttaaaaccctgactcacacattttaaaatattgacttatattgacaagatacagacacatatgcatgctaatgaggaacagaataaacatcacaaactatcaaaactatcaaggtattgcacctgagcacctgctaagtgcagacactgcaagctggctgatagatgcattttattttaatcctcgcagcagccctatgaggtaggtactgggatccgcttgttatagataaacaaccagaagctcacggctttaggtcccagctcgcaagtggctggggcagatttgaatgcacgttgtcataatgccaaagtctgagctcaagaatttctaaacaatgtctcgtctagttttctcatcaaagaggcaaaaggcattcgctctcctagaaatgaccaaatctcatgccagtcccacagttgctctgctgacactcaagaaggaagtagggtacctcaaaatatggttccaagagaggccatagtgggagtcatggcattttccttcttcctcagagggagaaaccagcaaggatcttcccacttggcttcctagagattgcagataggaaaacaaaagcaaataaataaaaagcaaacaacaaaccaaagtgtgttagcctggcctgctaagaagcagatgctgagataagattaaatgagcaaggattttatttttttatcattttatttgtgaagggtctcactctgtccccctggctggagtgtggtggcgcaaccatagctcactgcagtctagaactcctgggcctaagtgaccctcctgcctcagtcccccaggtagctaggactacaggtgcacaccaccacgcctggctaatttcttttttcagtggttttgtagtagcagaatcttgctatgtcgcccaggctggtctcaaattcctggcctcaagtgatcctccagccttggccttccaaagtgctgggattacaggtataagccaccgtgcccagtctcatacgtgaagattttattttattttattttatttatttattatttatttatttatttatttatttattttttgagacagagtttcgcccttgttgcccaggctggagtgcagtggcgccacctcggctcaccgcaacctccgcctcccgggttcaagcaattcccctacctcaccctcccaagtagctgggattacaggcatgcgacaccatacccggctaattttttatttttagtagagatggggtttctccatgttggccaggctggtcttgaactcctgacctcaggtgatccgcccacctcggcctcccaaagtgctgggattacaggcatgagccacagcgcccggcaagtgaaaattttattaaaggaaatgcttgtgagggcagggggatggggcagggggtagagagagctggaaaagttgggaaggacatcagacctcaatgcaaatctgaccctgagttaaggagagaaggttgggtaaaagcctcctagaccactggccaaggccacaggggaactgtcaagccaaagctgaatctcccaagaacaggtcttccttagcacagcatccttgctgcactcaaccattggtcaggagcagcctatgggaggcgtggctttggagcaagcttggcattgagtttcagagagcagatgctcaggcctttggtcaaatacactccttgtagttgaaggtgcaatctcatggagcgggagagggggaatcactcaaatggattaaaatatattgtgtgcatctgtgttgaggtggctgcatggatgctgaaggaagggatgggactggctcagcccatgagctagagaacccttgaaaactacggtcacagctgttgccttttctcatacactctgtgagtccaagtaactactattcatatttccccttagctaccacactgtgtggagagcatgataaaagaccctcagttttctttattatgaatgcagttaggctttcctttttaactataaagatatcaggcatgctgtgaacaccttattacagatacacagaaataactggaagaacccctgctgtccagctcccagtggaaacctccactaaccactgcatatgtgtcccttccattgcttgtgtgccctgcaaatgcaaacgagaagtaaggcaacaccatttattggacttctatttgtttagctccttgtgctgtgcacctgtctcctttgatccgcactatgaccttgtgagatagggccctttagctctactttctaggtatacagaagaggaagcagcagtcagaggaactaatgagacactgagagtcagagtaggcctgaaaaccaaactaggaccagaaagcaaggagctggcagcaaacgacacagatcagatcctcacctatgaccctaagcttccgggcagcggggctgcagctcataccacggcagatactgcctcctcccaaaaatgacactagaatgtatccctcaacagaagaactctggaaaagttccccgtattctccctgagagagagatcgggtctcttccttctatgagtgtcactattgcattttgactcaggattcaagggagaaaaagaaatctatccacttatttgtcataataattgcctctcttgccttttgattattcgaatcaaaaactatatcagggaggaggtgattcctggaaaggatgcagagttcccatccctatagcatgtaagcagactattttataacccccaattcttagtcacactctcaactgacagtatatgcttctgaaaagacagatgatatcccagaaagagagaacataataccaccagagctgctgaacttgcaccatgtttacttttgatcatctctctttatagggctctgggatctgcccactggactttattttccacctaagggattattacccttgctgggccctgagttcattttcacccccagtggtctcaagccataaatttcaaactgcttttaacatggccagacagatttgtaagactcctatagacagcatacaattaaccatctcctgtcagctggaaaatcagttcaatagccattcaagttcatgtccaaacccctttacattaacgaaagcttagaaaggttccttgactctcagagctagaatctctcagaagccgtggagacaggaggaactctgaaaggggagatagagtcagctaccagaaaggagggctctgcacatgtcagatgctcatacaggttataagtcaacacagtagcaccagttacttttttttttttcaccctgatcacttttttggagcagctatgcaagtaagtcctacaagataccagcctgttgatttttagtagtctgctctgtccctggaaattgatgtgcaagtagatacttaccaggggcaaatagcaaaatggccaagtgaacatgcttgtcagtggctgagggcactggcatgaatcatagagtctacagattatttctgtagcaaagtagaaggaaacactgctgcacggagcaggtctctcatccttggcattggggccgtggccaccaactcagaagagaagcaccatagccaagcatcgtgatgggtgatgcccagagtaaatgcatgtgtctttccaatgaaagtgtggggcgagactgattattgcgcagacttcacgagccaagatggtgggggactaatacagataaaagacaaacaagaaagccttccataatcctggctcaacttaccttgctgatttggtatcttactattctcctgctcttcaaccattctatgctccattcacatcaaataacttattattcctccttctttctcctcctcctacttcctcttcttcttcccccttctgcctttcctttttcatccccaaatctcttgggtctgcttttgctaatattcctccttccatctgagatgcctttctttttaactgtaaatctctatatattcaaattctacttggatttcaaatctcatctcaagtgttacctccttcttttataaagccttctgttattacccctgaattccattttatggcaataagaactttttcttggagtagtactttttgtggttatatcttctctcctattattagattgtacattctttgaaggcaaaagtcatgttcaattcaccctgataaagctagaatgaatacaacaatgccttaaacacagtatgtgataggcactccataaccactaatatgttaatgaggacacggaggtgtagtcaaacaaatagacacactggctagatagcttcatctgcatacagtttttcaacttgtccaagactgaagtcatcttgtcccccaagtctttattttctgttagagtgaggggtctcaacaccatccagttaaaaattctcaaagcatcctcaactctccctactcccatgcctttacaatcaatccccaaggcctcctgattttacgtaccaaacattcctttaacccgtacccctcttccctgcaaccaccgtcctagttagaaatcctttctcctagattattgcatcatccttcttatgggtttcaccaactcaagggttacacttgtctacttcatactccattttgtccagtgagtgatcaatctaaaacaatcctgattgtaccaatctcccaggttaaaatatttcaaagcctcccccttgcttatagaataaagtccaatctttttaatccagcctggaaagttcttggttatatggtctttctctactctgaagagctttatctcttgcctctcctttctttgctctttaaggagaaagcaacgctgtaccccttgatgctccttgctgtatctcccctagctgtggctgcacatgagtgatcctctgtgctgatcctctgatctcttctcctgggtactcctgcttactcatcctctaagccttagctgagagtaagccttccctcctcctgggctgtgtcagcctctccactgcactctcagaccactttcttattctctcctcctaccgtttaccacattacattgcaatcatcttttctcatacctgcctctctcatgagactgagccttctgtgataatgatcagtattttattttatttgcatgtgcaaccagaataaagagtagccccaaccccccgctttttttttgtcactttgtaaatgtcattggggcaatatgaaactttggtagaatgctttatttcctaattgctaagattcctactacttccaaagattcagaaggaaaacacgatgctccaagacgggtcaggactcttgcccagctagctttcatctggttcatcctggcaagattgggagagttgatggaaatacttcaacttccctgtacccaagccaagggttcttattatgagatgacctcattagtgacacatcattattttaaccatattcaaaactgagatgtgtggagaaatagaaagtaaaaaataagaagaagaagaagaaggaaaaggaggaggaggaggagaagaagaaggaaaaggaggaggagaagaagaaggaggaggaagaggaggaggggaagaagaagaagaagaagaagaagaagaagaagaagaagaaggagaaggagaaggagaaggagaaggagaaggagaaggagaaggagaagaagaagaagaagaagaagaaggagaaggagaaggagaaggagaaggagaaggagaagaagaagaagaagaagaagaagaagaagaagaagaagaagaagaagaaggaggaggaggaggaggaggaggaggaggaggaggagaaggagaagaagaagaagaagaaggaaaaggaggaggaggagaagaagaagaaggaggaagaggaggaggggaagaagaagaagaagaagaagaagaagaagaagaagaaggaggaggaggaggaggaggaggagaagaagcagaagcagaagcagaagaagaagaagaagaagaagaagaagaaggaggaggaggaggagggaaggaaggaaggaaaaggaagaaggaaggaagaaggaagaaggaggagaagaagaagaaggaggacaaggaggagaagaaagaggagaaaataaaataagccacactgaaatttcctgattaaaaagaaatttttaaccatctaaaaactggaaacccccatgaggttgctacagtttctctccctttgtctggaaatgacaatatgagcagtgagatctaacaaagttctctgaaaaatacagaaaaaaattgtcaagtcctgaaatgcccgcagaatgcagtctaggccttgagccttctgtgagggaaagtaattgcggtttttcccattacttctacaccaacctaatatatagctccacataataacgttttacctggggttactattctaggcattgaataaatcaattaagaaaggcttttcccaaaatggagcctgcgcgatgtttgaattttgctatctcctgcttcacactcttgatctttcttcgcggtggcagctctggtaaccccctttcctgctgcccacagccagctgtgtaggaacgagagggacatgctgcatgaaaaggagtctgattgctgaggagcagggtctggggaaactaagagcaaaccacctatacagcctggaggtaatgagacctgggttgtccttctgtctgcaaattggaatcaaagtgattatttttactgtaccgttgttctgctagattttagctgaagctttatcaaagcctggttcatttaaaacagtgtttctaggggaaaaaaaatacattccaaattccaaacaacaaggttgcaaatgaaggtgtgggaaagagtctctttttaaagtggagatgccacatgtctttgttaattaaccagaagattggagtcagtattcctcgctgctttctcaataccttcagttcttactgaacttgtcattaacccaaacatcctgctttattcccatcaaaactgtttccacgtttgttgttcttcgtcatcatgatctttgtgcaatggatttttgaaactaaaaatctcaggacttcacttttgaccccattgaatttcatttggcttgttttgatgcctggctaccagactcttcagatcatttttaattcttattggtaatactatcaatattggttatcctgtataactgttgatcatcaacacatttcagaagcatttcttttatgacttcatctaattttttttaaattaaagtgctaagtaggaccatggtaaagtagaactcaaatgatcttcccctgaagatgttccctcacattaacacccttctattaatagcattgaacagtcaaaaaaggtttgtaagatatggcagccatcctaagcacaagggtaaagaagcttgatatctgcctcaaatccctccaccctgtcatgggtaccaaccaggtgttatcgaaaaggggtcccaatccagacaccaagagagggttcttggatcttgcacaagaaagaattcagggtgagtccacagagtaaagtgaaagcaagtttattatgaaagtaaaagaataaaagaatagctattccatagacagagcagccctgaaggccgatggttggcttttttttttttttttttttttttttttttttttttttttgagatgaagtctagctctatcgcccaggctggagtgcagtggtgcgatctcggctcactgcaacctccacctcccgggttcaagcgattctcctccctcagcctcctgagtagctgggattacaggtgtgcaccaccatgcccagttgatttttgtatttttagtagagacggggtttcaccatgttggccaggctggtctcaaactcctgacctcgtgatctacccgcctcagcctcccaaagtgctgggattacaagcgtgagccactgcacccagctgcccatttttatggttatttcttgatgatatgctaaatgagaggtggattatccatgcctctcctttttagaccatacagggtaacttcctgacgttgccatggcatttgtaaactgtcatggtggtggcgggcgtgtagcagtgaggatgaccagaggtcactctcctcaccgtcttgattttggtgggttttgccagcttctttactgcaacctgttttaacagcaagatctttatgacctgtgtcttgtgctgacctcctatctcatcgtgtgacttagaatggctaactgcctcagaagcagcccagtagatttcagccttattttacccagctcccattcaagatggagttgctctgattcaaacgcctctgacacaggtatcacgctagagctttatgagttaataccagactgttgattggtcctcatcacaccctcaaatcaaggccttataaaaagaaaatttagaattatcacctgttttaattacatttagtgaaaatatctattttgagatattaaatgataatatagaaatatttatatttctcaaacatgagctttaaaaaaaaagtgtgagaactgctgctgaagtgcccaagtctcacccttcaagcctctgggtaggtcagcagccccattaatgagatgtctttatctctcctcctcagtgacaccgtgaggcaaagctaagcaagtcaaaatcacttaagaggcagttatttcatctctgacaatcaaatcttgttctggacaaaagagaacactttataccatgaggcattttatagataagctgctgagaactcccagcacccacagtacaatcaggttcatcagctgaccttttatcttcccgtgtgacaaagcagggacagacccttcccaaggacacaatgtgatcatgagcggtccagtcccacgaagcctggtcttcacttcttttgccaccagcagggtggttgtatgggggggtggggggtgggggcagggggaacagggatagaggcatgtagggctttgggggattagtcagagccatcagtcacctaacacttgaagagatcttctaaaggaacaagagacaacggagtggaaggagaactatctagagaagaaaggaagatggtaatagctaacattccttgagtatctacaacatgccaggtatgttctaggcacttcgcatgccttgtctcaaccaaacaacagcctgatggggaaaaggcactaatatctcaattttacctgtggagaaactagggcaacaaaaagttaagtcaaaaagtcagtatcagatagttggtaaacagcagagatgggatttgaacccagataatctggatccagactctgcccttgaattctccggcctccccaagtgtggtggtgttggaagtgagatagagcagccccactgtgccaagttttaagtctttcttcaagggcgtgcaatggaaacactacaagagaacggcttgcaccgaacacattttcaaagtccttgaataaaggctgtctctgccctttttcctgggccctactctcaccctaaacctcggtatcttctgccccacctgctcccacacggtggcttctcccccaacatctccaatgacaactaggttggcaatatttgggatccatttgttttcgattatactacacgcactcacacctcctccttggtcatttcgtaagaggtctggagaggttttggaaagcattcattccttccacctcatagaaccttctccttcccattaagagtggccaccccaagggtatattccactaggagaggggctggggcttccactgtgagaaggaggagggggagaagagggaaaagagggaagaaaaatggaaaaggaggaggggaggaggggagaacagagaggaggggaggaggagaggtcgggagaggaggaagggggaggggaggtggggaaggggaggaggaagaggttgtctcctcaaaggaagaggcttttcccatggaaatgcactgtggctggtgcccattagcatccctatgcataataagggttcagcctattgtcatgcaaattaattcagatgacaacactctctcctcgacaacactgccccagcacaaggaagtttctcacactgtctcagccaatactaaccggcctctacgccatctttcataattatttttctccccttcactcctgcaaggtttgttctcagctacatcccccttcacttcccagctgctgttggctccttttcatcccggaacagtcaacatcatcgccataaacaaaatacaatgttttttaaaaatgaatcaaaaccaggggaaaagttacatttcagatcaatgctgaaaacgaagagtttgactaaacagagaaaccaagtaatttccaggcttccacggagcagcgactcctctgttcccttttcccattgtggaaagattccaagcagcatctcttctctccggcaagcagcattctcctgtgggtcactcgggccctgataagacagatcctctgtgtttgactataaagcagtgactcatccttgccattgtttgtcctgccgacctcttagtcctggccactgaccaagtattcctgcttatccacatcagcaggcttaagttcagccaccaggccactgccaccggctgaggccagtttttaccctgaagcgagtcctctgtcaactctaacccaagagccaagagaaagagcaaacaagggtggcttcagaccaagccagaaggaggtgacggcagagctacagctcattcgtgctgtaggcgcagcctctaaaccctcttttcacctctccaccccatggatatccagatactttgtccctaaccctttactggcctgagcatctgatccctgcagcctaaagttaagagctggcactcgctctcacttctgtaactatgccttcttgttctgtacacagcacactagactagtttaaagcacagttccaggttctgaagatcgagttcaaatcctgattgtctattttctagctgcacaatcttagacaagttacttacactgtgtgcttcagtttactcatctataaaaaggaggtaacaattgttacacacctcccaaggctgttatgatgattaaacacataatacattgaaagtgctgaaaacgatgtctggtatgctgtaagcattttaaataaaatgttagcaagggttattaattaattttcccagacttcacctttttttttggtttatctgacttactcccctttctaattgagccaagttcactcctctacttattgcttccaaccctactccaggcagccccgttctggtttcttttgctgtccaaaatgttttgcaacaataaaatgcataatatcatgcagcattgctaacacagaaagaatgtgacccagagcctacccttgtcccaaacaccaaactggtccctgacagtcctgacatttctaccacacatttgagtagatgaggtaaggaaagacaggggcagagaaggacacagtagaaataaactgcagcttacacattatctgaacaacagaaaggctttgtagccagacaaattatatgcaaattatatgcaaatctgaatgtaaatactttaggcccagggagaaaatccttgaggagacattcccattcccttcaccctcacttcccaagctgcattttcttttctgattggttagtcgggaactcattatgaagattccaaggtgcatataattctctaaagaagttcattctacctgcttgtcaggggtcagaggctgaagagacctcaggaaggcaacattactgcagcttacacctccaaccgaagggagggctacgtccattcaactccaagccaagacaaagaggaaacggcctggatggctgtggactagctaagagctaaagaaaggacagaccccctcagggaccttgggctgggctggacagggttacttgcctggggagctaggtggcacgtttcttttctttttttttttttttattattattatactttaagttttagggtacatgtgcacaatgtgcaggtttgttacatatgtatacatgtgccatgttggtggcacgtttcttaattttggttagaggacatgcacttgctgaagctcactctaccaggatttgctcacattgttttaggtatttgaccaaatttgaaaggacgcatacactaatttgcttggaggtgggagcagaaagtggaaaaggggggagaaaaacacagctacttcattcattcattcaacagaaacttcctggggctctactgaatgttgggcagcacccccagccattacgtaggagctttcatctaagcttctcagaagctaagcattccacactgagaaaactcagtctcagagggcacaccttgctgtaagtttaatgccagcatagttgctgaaagaaaatcagatctataactacattgctgtcatgagtgagtggttatggtttacctctgctttccttgaccctcccattggaaatgtcccctgttccttcccttccgggtgatgatcatgccttatatttcacagagaagatggaagccatccccactaaacctacagatgcagccccactttagtcatcttctcctcctccttccctgatgcttcaggggaaaacaagtcccttctgctatcaaagaccaattgctccaaatcctccccagggacctgcgggctcagttagtcctctctccggggcaccttcaaactccctttcacttcttgagccttcttgtctgcattcaaacaacaggtcaatcaatatattaagtggattacctgcatcatgcacttagattaatgcttgttacatagcaggtgtgcctaagagtttcctataatcattctatgaaaagctgatcaatcttactagtatcgggaacaggcatgaaacaccaatgagatttcatttttttgtgcaagagcagcactgtctggcagaactttctgtgatggcagaaatgctctgtatgatcattgttaatatgatcgcctctagggcaatgtgcagttatcaaacatttggaatttgactggtatggctggggagctgaatttttttattttatttcattctaatcaacttatatagccatacatgcatagtgcttactgtattagttaggtaacactgttccaaatatctcgcaaaaactttaaaaaaattggcattacccagcatggcagagagtgtggaaagacaggtgcccccatacactaacagtgggtgagtcaataactatggtcctttgtagggcaacatggcaatatttgtcatttcaaatatgcattcttcaagttctcagaatctagactaaaataaactcatataagggcacaaaaactcatataagagtaagaaatttgcaatttgcacgtgtttgtttccaatttttccctattgcaaattattcaataatgtatgcctttgcttatctgtaaacagaagataataacagataataggctgggtgtggtggctcacacctgtaatcccagcactttgggaggccaaggcaggggatcccttgaacccaggagtccaagaccagcctgagcaacacagggagacatagtctctacaaaaaataaaaaaattagccaggtgtggtgacatgtacctgtagtcccagctactcaggagactgagatgggaggattgcttgagcccagaaggttgaagctgcagtaagccatgattgagtcactgcactctggcctgggcagcagagcaagaccttgtcaaaaaaaaaaagtatatgtgtgtgtgtgtgtgtgtgtgtatatatatgtgtgtgtgtatatatatacacacacacatatatatacacacacacacacacacacacatatatatatatataaaaaatagataataatcatgcccagggttattgagaagacagaagtcaatttatcttaaatgcctaacagaagttctagaacaaaggagatgctaaataaatggtaactattatcactttttttttttttttttgagatggagtcttgctgtcacccaagctggagtgcagtggcatgatctcagctcactgcaacttctacctcccaggttcaagcgattcttctgcctcagcctcccgagtagctgggactacaggtgcgtgccatcacacccggctaattatttttgtatttttagtagaggtggggtttcaccatattagccaggctaatctcgaactcctgacctcgtgatccacccgcctcggtctcccaaagtgctgggattacaggcgtgagccactgcgcccacatgtgataactattattaattaataataacagtactagcattgaaaactcaggattgggatcaaagccttgtaaccccattcttaaggcttcctggttgtatgattagcagaattcaagacggacctgctgtctcgggggaagaaaccttcagaggagaatgtaatagagaggtctcaatcacaggagggcatactgctcagactccgtactcagtactctatcagggcaaagggtgcagaccagtggttctcaactataggggattttggacacagactgcccagatctaaccccagcccttcctctcaggaactctgcaccatggggagttactcagactctctggccatagcttcttcatctgtaacatggaaatgatgaagataataaagagagtgtgtcccaaagggaaagattatatggcttaatataagcaaaatgcttaacttttgtgtcaattgcatagcagatgctatagcggtgatgatccctgttatttgcctaggcccatggtatggcccagaccaaagtcgaccccctttatacttcagtactcggtactaaaataaaccatgtgctaaaataaaccccagagctcaattcatttctacttagaatcactagagatgtgaaatttccagaaactacaaaatttgaaactataaaaaataaccatcacaaaaactttcatgtatatgtgtctgtgtgtgatggaagagagactttgtgaacttttataattactcagtgctgcttgtatacggcacccttgaaagtttgaaatcctttggaaggattagaagcacaggcatgttatagagacttgatttgtttattaccttgcagtgctgggcatgttttcaaactagaaatgggtgaggggcgtggggctggagagtcacaggctgtgagagtgactgccatcaggaatgacagcatggtgtcggtcactgtcagtcagggatgagtcaggaattgaggtcccatccacatgcatcctcagcctcgctgcttctcctttagcccaaatggctccttccagattcacatcccaccctcacactccctccatcttttctctttctctgtgtgatggaaacagagtgaacactgcagtcccactgacctgtgttgaaattccagatttttcctttgtgtccttgggcaagttattgaactcccctgagcctggctttccttacccgtggggcttgttctcagccagctctcagatccctgctaaactctgaatggcggataaagaattaggcttgtgccgggcgcggtggttcatgcttgtaatcccagcactttgggagggtgaggcgggtgggtcacgaggtgaggagttcgagaccagcctggccagcatggtgaaacctcacctctactaaaaatacaaaaatcagccaggcgtggtggcagtcgcctgcaatcccagctactcgggaggctgaggcaggagaatcgcttgaaactggaaggcagaggttgcagtgagccaagatctagccattgtactctagcctgggcgaaagagtgaaactccgtttcaaaaaaaaaaaaagaattaagtgtggactcctctgtcatggctaaattccctccttccctgtgacttcatatgctgaagtcctcacccctggtatctcagaatgtgattgtatttggagacagtgcctttaaagaggtaattaaagtaaaatgaagtcttatgggtaggccctaatccaatataactgttatctttacagtaagaaaagattaggatgcagacacacacagaggaacgactgtgtgaggacaacacaaggcaaagacacccatctacatggctgggcacagtggctcatgcctgtaatcctagcacttcgggaggccaaagcagggggatcacctgaggtcgggagttcgagatcagcctgaccaacatggagaaactaaaaatacaaaattagccaggcgtggtggcacatgcctataaccccagctactcgacaggctgaggcaggagaatcgcttgaacccagaaggtagaggttgtggtgagccgagattgcaccattgcactccagccggggcaacaagagggaaactccgtctcaaaaaaaaaaaaaaaaaaaaaaaagacagccatctacaaatcatggagagaggtctccaaagaaacaaatcatggcagaccccttgatctcagactttcagcctccagaacaatgagaaaatgatctaagccatccagcctgtgacactttgcaatgacagccctagcaattccaaacaggttggaattacagaagggaaccaagacttggttgagaggcttgcttcgtttaatggaaataaaccttgacctctttttctagtagaggtcactgaattcagccatggacttcagtagggttgttcttacgcctcctccagacgtgcgatagcacaaaaaaagaaactgagatcctgggatcatttccaaaagccttttttcattaccaaaatgtgtctttcctaggccagtcttccatcatctctctctctcttttttttttttttttttttttttttgagacggagtcttgttctgtcgcctaggctggagtgcagtggcgtggtctcagctcactgcaagctccgcctccagggttcacgccattctcccacctcagcctcctgagtagctgagactacaggcgtgtgccaccacgcccagctaacttttgtgtttttagtagagacgggtttcaccctgttggccaggatgttctccatctcttgaccttgtgatctgcctgcctcagcctcccaaagtgctgggattacaggcatgagccaccacacccagcctccatcatctctttctttcttttactcaccactccccaccaccctctaccctacacacacaatttcacagatagggggaggcagacaagtgcttgcatcttctgctgcctctagctccaccaggagaatgcagagacccaagaaaccacaacacaaagggaaaaagaagaaaccgtgggatctaacccatttccttcccacttgttacctggttctcatgtaacccagtcttaaatgtccaatgtccctgttgcatggtttttttgagggcctgagcccattgaattgttttcatttccctagatgcccccttgtgccatcaacaaagacggatggttggaccctctggctaccttccatacgactttatttgcaaaatccaggaaaaaggactgggcgtggcattagaaccccttatcaatgtggagatgggcggggaagactaacagagcggaacaacggaagacaaccctgaaggcagctcttccatcaaatgagttctgctttagatttcacaactcacacaaaacatcacactacgcctgccaatcgtcccagcaggggagtgggggggccgttggtgggggagaaaaaagcaaaggcatcattcaagctgcctgccctgaacccatcatcccctgtgtgtgcgtggactgtgctgctctgtcctcataattcacttccccgaggtgtcacggtgtgaagggcccaggcatgcttcctcatggtttccctaatcctcccttgtcaagtaacatatgcatcactccctcggcctcaacccagtcttggcagatcctccaccaacatctgttgcccgaggcctgcctcatacaagcttctccttcatcaaatgacaagaccagtaggtaaaactcatctcttccttccctttctgccagctcacagcttggggtcccaaggtctagcacttcagcgtcaaacaagcaccagtcaggccaagaggcggaggcggccccaagagtgtatcgccagagacatcttcctccccatcccccatcagaaagatgccctgctgacctcctcaacaacatcagtaatttgtcttggagagccgccatacctacagcaaacacaggaaggattagaacacaacatatgctgcacagcaacagaaacatgctaaggtccttcctgagtctgaaggattattgagggggaggagagagagagacagaaagcaagaaagatgaatgtggaataagagaaaccccatttattcatccaatattgaaaggaaatggatgccttagaactgggtgtgttgaagtcaaatccgatatgggctttaaagcccattggtgacagatgtggactttcgccaagtcaaccacaaaataggatcaaaggaagttgaaaaacaacaacaactgggtctccctggctaaagttttttgctgcccttggaatgttggcccagtggacatcatcaggaagtggaagaaagactaggaagggctacatttaaataagttagaaaaaaatagaaagatccagaagccagtctgatgccttgaggatttggggcattctcctcgcgtaaagaagcagaaaacaccagctaaggtggagactgatgtctagaaccagtactgctccttagagaggaaatcgcttcaccttattcaagagaaacacatgttgagccataatcagtgcatttcacaggcgaaagggacagtaaagtgttgggagtcataggccatattatttgggttcaaatacaagttctgccactttttagctgtatgaccctgggaaacttcttaacttctctgggttttattttctcatctaaaaatagggttgataataatagttgtcttaaagggttagaaggataaaatatccccatataatatgcttaaaacaacgtctggcaagggtaaaaactcaataaatattagcaactattttgatattaatttgtaagaataaatttacctcctatagaatgtccaccttggggcagagaagatcaaaagcactgcgtgtgtattcacaattctgaactcaaagagtctctatcaagtgacagtaatttgcaaatgaaaattatgttatacaaacgtgcaaatttttttttttttttttttttttttcagacggagtctcactctgtctcccaggctggagtgcagtgatgcgatctcggctcgctgcaagctccgcctcccaggttcatgccattctcctgcctcagcctcccgagtagctgggactacagacggccgccaccacacccggctaattttttgtatttttagtagagacggggtttcaccgtgttagccaggatggtctcaatctcctgaccttgtgatccgcccgccttggcctcccaaagtgctgggagcacaggcgtgagccacagcacccagccaaacatgtgcaaatttcaaattcctcatttctcacctctaaagccagactcgacaacccatccagtgagggttgaagacgtaactaaaacaacaacaacaaatgccttgagaagaaagatatgcttcaaacagggttatccatttgctagtactttctagttggggccaagttctaacttgctctttggtcaacgaggatagttagcaacatcagccactctgtaattacctggctaccctcaccaccaatggaatatcaacccttctgtccctcctcttccaaatcagctcttcactactctttttgcataatctaaagatctatatttctcaggtcctttcagccaagctttgtagagatcaattccctggtgtcaggctatagctatgttagaggccagtgggaaaaaggatatgctatcatcactcattccagggagaagcccctttatacaagatacctcatccactggcaaatgttcctagctgtgggaaggagagctggaagctcagacgagataagaggctgcatgccacctcacccactgactattcctctctggaggagctccctgtgtagaagaaattgatatctctccataggagcatctccaaggccagctgtgtatagtccagggtaacaaccataaaagctgggatatggggatagaataagtttgcatggaaatttctcatcttagaaaaaaattaaacagagtttacttgaacaaataaggtagtcttctggtttttagatctattcaaataaagcaacaaaagatgtctgtgacatgtatgacaaatacgtttcattgcatctcaacaatcaaccctgttaggcttgtggtaggttcctgaaggactccactaaaatggattgtgaaggcctggcatggtagctcacgccacccagcactttgggaggccctggcaggcggatcacgaggttaggagatcgagaccatcctggctaacaaagtgaaaacccgtctctactaaaaaatacaaaaaaattagccaggcatggtggtgggcacctgtagtcccagctacttgggaggctgaggcagcagaatggcgtgaacctgggaggtggagcttgcagtgaaccgagatcacgccactgtactccaggctgggtgacagagcgagactccgtcaaaaaaaaaaaaaaaaagtattgtgaaatgacaaatcagcatgaagctggctgtgattgattatcaatgtctgccatgtgggggaggaagttgacagtgactgattagcaatgaatgccataagcttggccttggatatgtgccttgagtagtatgaaatgaaatgtctagtttttacatgcaatctttccaaggaatctttgaacagttcctaaaaattcctgggccttcattttcattgccattgaatatagaagggagaagagaaggaagaactaatattggtttatttttaatgttagaacgaactggtgtctgaagtcagttttgatttacatatgttaaagcaggtagggacaatcccctctccaagtactagatccagtcctagacaaagaggaaaaagccgatttctacatttgtaaaagatttcattttttgtctccctaaaataatttatcaataagattggcagggtggggtgaggggaaacaatatgaactgtacttgtttacattgattgaaatagatcaaaaaacctctctcaatgtcctggatattactttatctctctttgtcttccttttggaagtctctttctccaactttcagagatatgccagaggaaaagagatgaatataatcccaaattatggactagggttccctttatgaggaaagtaagggagaaaagggagattccagaaatacaaatgaaccaaaaaatttggaattaaagttaagtggtattggctttacttggagataattgtttttcctagtgtgtattttaagattaacttttgctgtcctgataaaagagacagatagagctacggctatttatttattatttcttcttcttgccttgaatgcagatgtgatgcctggagctgcagaagttgttttgtgaccatgaggctacatccataaggatgaaaagccaacaagttaagctaagtttagaaagagtagtaagttaagaaaagtgtagaaaggtagaggaagcatggacttgttgatcatcactgagcacgaaaacaaccctgtaccaccaacccccagacctccttgtgaggcaattaaaattttaaacctgtgttgtttgaactttactatttgcaactcaaagtgtttttttctttttttcttttttttgaggcagagtctctgtcacccaggctggactgcaatggcactatctcagttcactgtaacctctgcctcccaggctcaagcgattctcctgcctcagcctcccaagtaactgggactacaggcacatgccaccacaatcagctgattttttttatttttagtagacgtggggtttcattatgttggccagcccagtctcgaactcctgacctcaagtgatctgcctgcctcggcctcccaaagtttgggattacaggcatgagccaccacacccagcgaaacccacagtatctctaaagcagttatttaccttactacaatatttgtttcttttaggcaatgggcccatactgatttccacaatttattaaaattggatattcaaaaaattatttttaaaataagcttaaactgtcaaggggtcacagagaaaaaaaaaagtgtatcataccggctagcctaaatgggagtatggacacaaagagatgaaggccagatttccaatgtgattgacttttctaacatattctcggtgatgagaacacatcccaggacataggccaagcttttctaaatagagcatttcccaaagctgtgcccttggtgtcaacacctttgagacttgagtcagagagagagcccatctgtacacatagcctccacccaccttcagcttatcctgtaagcaaagtatagttgagtcagctctcagcacctgtcttaataatttggagggcatgcaatctgcctttctctatgtgcaactcacaagaaaaagccagaaaactgctatggctttagatttcagtgtcctagggctcatgggcagtatctattatcttttctaacagagcttggaaacacaaccaccaaaacagtcaggaagggcttgagatgggctaggaagacctcttctttccaaacaactagctattactcatttaccttgagaagatcagcaaagaatacaaacagaatcttctcacatcctgatttatccagtgaaaaccatatgtagaccatcctgccccttcttttcctacaacctctcagaaacaattagtagaaagaatggacgagatcaaaatgagaggagaacattcctttaacctctgctctgtacctggcactgtgctggtagataccttcatatgtatttaatcctcacaagaattctacaagcaaggggatattgtccccattttatggataaggaagtaaggattagagaaaacaggtgacttgtctgaggcccacagctaagtgtttctggcagagatcattagtgttcatccacacccatgtgcatattcatagtttctagtcttccttgcagtagtgttggtcatgtgattgagttccggaatgcagacagaagcaattccccccacttctcagctggacccctgaaatatcttgcatattcctgtccctgtgaccagaagcaaaagactccacaatgaccgagccagagaagacaaaaagagccaggatctttgagtcatcccttggaggagagactgccatctttttgaattattacgcaattgatattctcaagtgtatttattactaaaacatgacctaaagtactcttacttctacaaagatcccatttaaagagggtccctgatactctagtggaggatctttgaagcaatgggagccaaatattacacaggttcactgtgaccagtagaacatccaagccagtgaaactacttcaaaatgaattcaggatttcatgtgcataagcaagatgtgttgcgaactctggacagaacacttttcttttgtgcgtctgtcttcaccaaacacagtattcagatattatagggtcccaaaaatacatgttgaattgaatctagtctagtctcaggttgggcttcaacttggtataatagtccttggtaaattcctcctaaattctctgtctcagtttcttctttccttcaatgtaaatggagttaaacctgtcgctgtccctcaatgcgtctaaaaggaagagcccaagaaatccacaacattattggtagaaatcattgaaagaaccacatccgtgtacaattttagtatgctctgactcttcaggtacatatttcaggctggactaaactctaagaagccaaaccagtgattatcccaagaagatcaacccttattaagaaactgtcaaagaaaagtaggtggagagatggattagcggactggaaagggctagaggctgctggtgaaaagcctcaaagatttagttagaggattttgtatccctagtcctcgttctcattatatagcatcttccatggtatgtgactgttgataaatattcattggaatggggactgacctaatgtaatgcaaatcacatgcaaagcaacatgtaaattggaaccattatatgaagtcaataggtgaggtactatgcatattaaaagtacaggacaacagttccaaaagacccataagaggcccataaaactagcaggggacattccattccaaaaggaatctgatagtcaaagacagaacattgctgccaaagaatgtcaccaagcatgaagcagggacagcgaggcggtaacagagagagaaacagaaacccggctgctgcttgctctccccatccctttcaaggctgtattcaaaacagttctccttcatcgccttcccatactgatcagacctgatactgattgattggtcaaatccactgagtgacaggagggcagactgatccgcttgtacattagccacgctattcaggatggctccttcaagccttctaacaaaagagccggggacactgagacacagccagagagactggtcactttgaacccgctggcaccacacgcaagacttttagaggcttttgtatcccctgaaagctctcttcccgtgagtgttgcatggtcacacgcaatgcatgcatgttttgcacagattagcatgcatctgcagaaatgcataaagtacaaagacatccccataggcacacggatgcaaacttttcacctccaccatcccaagggagctgcaggaggatttgactgttgtgaagtcgctaggccagggaaggtcacaggctgtttctgacgggagcccccccttgtgtttgctttctgtgcctccacgggcctcctggcaggactaggggacatggaaataagtcagcagtgacccttctggtgacccatggcctcaccagccaactcctgattgcaacattctggcttcagtaacagcccttaattcacgccttctggctgtgcccaagtcacagtggccctggagctggtagcagtaagcaaggtcaggctcaagagctccacattgccacttcacaggagaggcgacgcaagggtcgggggtaagggatggagcagtgacaagggcaaacagggacatttctgatttctcagcaaactgagaccctccctttggccatacacccctcctatcttctgcgttaggctgttacccaagctcccaagctaggatctggtgttttttttgtttgtttgttttttttgtttttttttttagacagagtctcgctctgtcaccaggctggagtgcagtggtgtgatctcagctcactgtaacctctgcctcccgggttcaagtgattctcctgcctcagcctcctgagtagcagggactacaggtgcgtgccaccatgcccagctaatttattgtatttttagtagggatggggtttcaccgtgttagccaggatggtctcaatctcctgacctggtgatccacccaccttggccacccaaagtgctgggattacaggcgtgagccactgcgcccagcctggtgtttttcagtcactggatgtaaacctaacatgcacaccaggactctggtcatagaggctctgtctttcatcccctgttcctctgtgtgtgtcacacacacacatgtacacaactctgtaggtggttgagttggtacacccctctacactagtgacatgtggctttttttcaaaaggatcttccatgagacaattgacatggaagggtcaaagcaaactcctggctctcaggagccttatgcgcggaactgtctcccaacacagacagaaccatctcaaagactttgaaagtgatgactctgcccatctatccgattgtctcctttcacagatgcaagacctgagacccaggaagaagtgccccaattagagttactcacattgctgggccatgggtacagccaggcttgcattcatcctctccaacacaccatgccacaaccacaggcatcacacacattcccagatggccaactgatgtccagtccctcctgccactgcttccacaggcatcagcgctcctcactcctctctgggttcttaggggttattatagcaggtagagcccagtgataaaaatagcaacgatgacctaaagaaagttcaaagtaggaagcagaggtaaaaggcaagatcctgggagccaaacacattgcatgtgttctggcaatttctggagagtctacaaaactgacttccaatgcttgacctccactgcctatagaccatgtctgatctgagttcttctgacagcaggcactaccccttccttgcttctccagtccaaatgcaagcatatcctatcttttgaagcatttgcctttccactccaaggtttaaggaactgcaagacaaatagtataaaaagatgaaagttgctgggaggaagtcagcactgctaagtggttctttacagggcagtaaaccccaggtcttccctgtctctggagggatcaacaggattgccttcccaaccctgtctgcactcagcttctccccagccagcacagggtatctgcctcccaaaggaagaaaatcggctgcctaaacctccctctgcttctacacatattaaacacactctgtcaaggtgatgcgggcttaacatctgacctgcttttatttctcttttctttttgcagaagtggtggcaagtttactatttttttttttttttttttttagtttgctcatttttaaatctacaaagtgaaacttgggtcacatttttaaaaaatcaactgtcaaatcattcccggagttcccatctaaagactggcctgacatttcacctccatgctctaaagaatgcatgccctgctttaaaaacctggatcttcttggctgtacaggtttatgtggaagcatcatttggtcttagcctgagactcagacccacattcacaagtggcttcagagtaataacaccttccccagagttcgaggcccttgtctgtcctgggtagtttattagaaaaggacgcctctttgagccccagcttggaaggctgaactgttgaatacagtgccaaggtagctttccaactttgagctccccaagtcattcattcattccttcactcatctacaacctctcattcattcaaccagcaaaaccagataagcagaggaacatgatccctgacctcatggagctcacagtctagacagggagatggacaataataacagggctaaagttggtagagcttcattgttgtggcagagaaaggcacaagatgaatcctagaggcaggcatgggttggtccctcagggtcaggaggccccagaggccatcacaaggattttggtattcagcctggggacagtggggagccatgggtcccaccttttccagaagggacacacccctctggtttgaactaaaattttttacatccatccacatgaaaagtccttcccccaaactagagctggtcgttcatgttacgccactcacaatagctccttgacaccagacgcccctcgtaaagaagacagagtgggtgttcagagtctgagagtcagcaatgagagagctagaaagagcccaggttcccagtctggaccagaatcttagcatggctggaaaacaaaggtgatcaattcagaagtcagccatggaaacatgggaaatggcacaatatctgtgtttagaagctgagatgggcaatggaccattccattgaggagttagcacatgctcactcaggccaagccacggcttagccaaccatccttgcaagccccaacacaggtagcagcccctgccccatgggaaggtagctttaccaacagccaccctttccagttgaacaataacagcacagaaggtgaactaagccacagtgtaattagcaaaatgatagggaaatatgtaagcaattcaagtgccactagagtgtcccttaaatgaacactggaatagcccttaacgtgcggatgaaggagaaaactcgaacatctaaccctattggcaatttttcaaatgtctttcagaaatctctaaaccataacaaacctttggtttgaaaacttcttccagaatccagctcagaaaattcattgtcacctccttctcccttgtcatcaatgaccttttccagttagtcttaaaaatgcaggatatgcatagactggttttaaactcaggcttgcggcagcactgtgggattctgagtagtagaagccttgcaccaagaaggtaaatagtcttgttttaacacattgtctgaatcacattctctgaaggtctaagaagacttgaccttgtctggtaagtggtctcattggctggactcaaaaagaaaagacatgaaaaaaggggaaggaggaaaacagaaaacaagccaagtaaaatatgagaccaattcctaaactcttgatgtttggggttgacatcttccctcctgttcttaaaggagaatgaatattatataaaactttcccaagatctagaacaatgcctagaaaaatggaagaaaatgccaggatgtgccactagccactgaaggacaacacattcattatctcactctccagaaatactctttctccttcattctctgtcctagttcatggtaccaccacccacccagatgaccaaggcaaaaacaaaaaaacaaaaacaggaaccgtccccccacccccggaggctttttctttctctcacttgccatagctagctgaactttcaatttcacctctgcaaatgttctgttatctctccccatcattgccatcgaatttgggccacgcttattctcttcaaaatattattacaattcccccaaatattggcaggcctggatccatcatttcatccaactcagtgctctgattccacctgctcagagagctcttctctggtcaattgatttaaaatgtgactccttgtgactctttatccttacccacctcgttttcttttagcaaactttatttatatgtaactaaatataaatcatatctatatataaatatatatcatatagttatatatcacatattttgttcacatatgtcatacatttagttcatatatataaaatacttatcattggctttgtatttctttatatataaatatatatcatatctacatataactatatatcatatatttatcatatgtttagttatatcatatatttagatacatatatcacatattttgttcatgtatattacacatttagttcctatatatattaatcattggctttctcttctataaatatttgctattgcaggatgtagtggctcacacctgtaatcccaacaccttggggggtcaaggtgggtgggttgcttgagctcaagagttcaagaccagcctgggcaacatagtaagacccaagctctacaaaaaatacaaaaggttagctggatgttgtgccacacacctgtagtcccagctacttgggagactgaggtgggaggatggcttgggcatcactgtactccagcctgggtgacacagcaagaccctgtctacaaaaaaaaaaaaaaaaaaaaaaaaaaaaaaaaaaaattgctaccagtaagtgaacaaatgagtctccccactgtactctcacataccctctggtccatcctctgaattggtgagactcattttctgaaacacacacttggctgcattatttaactactgcaactattcccatgccttacagttacccacagaatgagccccatgtgctaaagtggcaaacccagggggccacagcctggccccctgccagtcctatagcctcatcccaagtccacattcacctcctcaggcctcacccccaacatgccttccacatacaatgactatcagctccccaaaagtaccatgctctttccaccctcaatacctttgtggagatattttccagcctaaaatgaccctcctccctttgactgccaggcaaactccaaaaagctgcccctcatccacccactaaccctgcctcatcccttctcctaccttgcatatcacctctatagtcagttacagaatctgcagggtatagcatgtgcgcttgtgtctttgtctgtgtccttccttggtctaggagtagggaccacagcagtttagggaacactcaaagcttgcagcattggaaaattctttcaagttagcttttaaatcataaaatacaatgaaatttgtgacagtttaaacagtctccttaaatatctcctcaactgtctgttttttgtgcccctcccttgagatctcatatatgagaggaaatatatatatgatcatatatatatgatctcatatatatattctctttctgtgtgtgtgggtgtatatatacatatacatacacatagagagagagagaggagaagaaggaggagaaggaggaggaggagaagaagaaaatagagcagtgagatacgaattttttatccaagcgaggaaaaaacaatgaaaagaaatggccttcactgtttcattatattattacataactgcagcctgaactcgaatgacagagacgttggcaaagtggctgactccaccaagaggagctgctgggcacatccgatgaataaaaatggcaagaagcctaaaatggactggaaatcactttgagctttgacttttatttctctggagtgacaggaagggtagctggaagattaaaactctcagactcagctcaggctgtcacccctgcaaccaaaccaatacacacaaacaagcccaacctcagtgtgccttctcctctctcttctcccctctcccctctcctcccctcctctctcctcacttctcctctcctcccttctccccagttcccagctttcctatcaaatgactccatctgtcccaagaccagtttccttttctttgctctgttttctctgaggagcccatgctgagtggagacagagccaggaatactaacagttggtgaccatccagggacaccagccactgttgttaccttcactctcaccaccaaaagcaattaaaacaatatgtgtacaataaaatataaaagcatatttcacttctaggaaagggaaagtggattcaagcattaaagggagagcctgggttgcagccgccagcagctgcaggctgttctccaagaaagaatggagctagagagccaggcaccagctcctgtctctggtaagtgcaagagctgagtggagaggatgcttggggtggactgaatgtgtcaggagactctgcatccatttttaaaaacggctggagtcactatatccttagcccccattgtatctctccataaattacccattggaccaccccaaacagggaggtcggggggtgacagagccaatttgctagactccagcatactcactgtttcttgcatttgctcaaggaacttttctctgtcttaaaaacttgagtgtgaaggtctctgttttgatcttgtgatgcccaagtctcctagaaaagtctgaaaataaattattttacttccctaagactccagcaaatatttcagcaggactcagcttcatgcttagcctagcccaggagaaacgcattcacgaccctgcattcaaaaaatatagccctgttagaggctctgagatacagtcatgtacaaaaagacaaaaaaaaaaaaaaaaaaatcttctcttctagatacttgctttttggagcaggggaggggaatcagaaaattaaaaaaacagatacggcatggtaactcatgcctgtaatcccagtactttgggaggccaaagctggcagatcgcttgagcccaggagttcgagaccagcctggccaaaatggtgaaaccccatctctactaaaaatacaaaaattagccaggcgtcgtggcgcacacctgtaatcccagctacacaggaggctgatgcatgagaatcacttgaacccgggaggcagaggttgcagtgagcagagatcgtaccactgcaccccagtctgggcgacagagcaagactgtgtcaaaaaaaaaataaaataaaaccttaaaaaacactggagtaattaaaattatagatgtcagatagtgagtgctgtggaagaaagacaattggaaagggtataagatatactgggagttggttgatttgggtccaagcagcctacagtgagaagatgccacatgaacaaagaaagtcctgaaagaacgtgaaggaagatgcaaatacctaaagattcaggattacagcaaagcttcctgggcatctcacattgtcctaccccaaggcacgaggagcaaatgaaaatcagaagggaggaaaagcaacggaaactgcatcacccactgtacttgttgccatctggtgggccctggaaaccatcagtgtatttggttactgtgtttacacagccggcaggacacacactgttcactcagggctccccagagctgtcggaatggtcctggcttccctggattcctgaggcccctgcatccgggttctggggctcaacaattcccctgggttgtccaaagacaggggccctccaggaccaccccaggcaggggccaggtccttatctaagccaagtcctgggcctgagtgtcaagtcaggaaagaagacttgggaagttgcctgaaccaagaaggcagatagtctggccgagcaggctgctggactgaggatagcaaatgaatgaagggtgtcacactgaccaacatgcctgacccgtgcaaaaagctcatttattgttggttacgattaataataaccattggtaaaactctgttccaggtacatgaagtttgtacctgtctaccaagtatgttacatgcaggtgttgtttttgtttgcatgtaatcctatttttgactgatttttagagtgaaaaaactgaaaattagaaagactcaatacctctcacaagttggcccagttaataagtggcagccagcttttgaacccaaacccatccagtcctaaaacttaggttcttgatctctatgctccagcctcacctacctttaagagagaatatcgagggccaggcgtggtggctcacacctgtaataccatcactttgggaggccgaggtgggcagatcacttgaggtcaggagtttgaaaccagcctggctaacatggtaaaaccccgtctctactaaaaatataaaaattagctgtgtgtggtggcagatgcctgtagtccgagctaccggggaggctgagacaggagaatcgcttgaaccggggaggcggaggttgcagtgagctgagatcgtgtcactgcactccagactgaaaggcagagagaacatcaaggaaacacttcctgttcttctgagcaaaactactctcctctttctaatttagaacatcaggaagaggacagtttgcataatgaaaaatcaaggaaggcggttattcatgtacttaagcttcgacaacttctagtaattattttcagggaggctgcatttctttcagctgctaaggacagtacctaggaggctgtgaagaacaagctgatggtttcagatttagacacacattgggccgcagcggcaagcgcccagtaggtcctcaatcttgtaaatacggttacatttgtcatccctgaccctcacaatgtgatttgcatagtgtcttggaccaaatatttgtaggattgctgggatgtgtttctcatttcagtggcatggaaagttgtcctaagaaaggctggaataacctgtggtctctggatgaaaaataaggaaactggggtcccaggaagtaagagttcctatctgaagtcattccctgagttagtgcaagagcccgaagccagggaaaccccagctctctttcagcatcacgtgccattcagctaaattctcagggcccaggacagccttctgtcacccacgggctaaagtcatcaggaaagcaaataaggatccacagttagaagaagaaaaatgtttccgcccaccctaacccttccgcaccacctgtcacctgaaaacccaaaactcagaactgccccgagacacatccagccagaatccagagagacctttgaggctggggctgggcccactcacctctcatgaggaggcaaaagcaaatgcttctcctcccagggctgaccaaggcagtgggtggacaagcctgggccaaggcaaacagggacatggcacctgaaggcactattgacaaactgggtgtgttaatggaccaagtggggctagaatgggaaggatggattctccgaggctgcacagagagtgcaggagagaaaagaacttccaaactgtctcctttagccttggctacccctggagaaagcccaggtgtttcacctccctccctccctccctgcttctctgcctttgctctgagagccgggccttcctgcaggctggctgtttaacgaggcaggttgagaattttcagcctctaactcatgtgttctaatcctattaaatatgcaccggcttcaaaactcagctttttaaaaacttgcttccccacccccagcaccaccccctgtccccccaacctcgcctcacttagtcccacttgctccattccagcttgaaaagccattgctcagttgttggcaggggtcccaccagcgtttttgcaaggatttgggctgtgattcagctacctgcagctgttccccagttaccacccacgtaaaggaatttctgatattaaaacgggtgacaaacttcctccccccttcccccaacacattagtttgattgacatccacaggccaagtggccaagttcaccgtcacttggttctccctattcacttaataatacatttaattccacccaccagccactcctccccgtgctttatacacactgccttctcaccctgaagagcgtcctctgataagaccatcgaaataccatttggggatatttaaaaacaatctactgaatctttctagaactaaattttgttctccctttatcatctaattaaatcttcccaccactgcaaaaaatcctcctaatcccccccctcccccggccttgtgtaatgtcatcaaatgggagtggagagaggcaaggaaagagagcgggctgaagttgaagatccaagttcagatagttccatggagcttttcagagccgaggctggaggccacctgcttctctccaactgtgcagagatgccagggtgttcgtgttgaccagatggaattgtctccagcagagcatactgaaccagtatccacaaagctgggcacagacctgagcttcccggcttcagctactttcttttgtgtgtgtgttggggttggcacggggggaaaatggggtggatgtgcaaacagtgcagatggccctggaagtcgatggccctgcaagtcaactgcccatcctccttctggcagaagtcccatctcagcctgggctcatcaactatatgcttcctttcaaaggaggatgcaatagaaaccaacctaacaccaacaaaagcctcaacagttagcattcaaggtacctaccttaagagtggacattcaaaaggaggcttttgagcaatgaccaagctggagcccctggataccaggccctggctttctctgagtttctcccatttggtttggcagatactctgcgggggaacaatagcaacggccccaccagtcccatcaaccccaaggccgcgtccccttgcttctgggcagtagccagtaatgtgatccttcaaggcagtgccaaaccccctgttgggaattcagccaatcttggggctcttcagggaagaaaaattcctttccctgacctctgcaggtgatcggattgaggtccctgcagcttgaaatttgatttgatctttgatctctgcttgcacagctgcaatggttattatgctccataaagtgtcccggagcccttccttgctcacctgccctccatagtgagtgcttggggccaggtattcctgagcaggggaagaatattacttctctgtttttctcatcctgcactcccttcatttcagtcgtgccttctcattcccctcattcccaggacttaaccccaaattccaagaccgtggacattttcaagtccttctaaatgagagcatgtggtttcattaaaaaaaaaaagtactgtgtgttaagagccaactatttaaccaaggtcatagtcccagaatgccgcatgtgtctaaagaagtcttgtagaagtgtggtcctcaaagtaagtttttctgggtttagttcacttccctgtcatggtgagatcattctggggcagggagatatgtataaggaagcaagtttaatatggttcatcagacctatttctattttattggcagcaagtgacataataatagatacttactgaaagcgaactatattttggatatcatgctaattatctgcatggacgcttttaagcttcccaaactctaagaagaatgtactattatcttacctcattttacagatgaggaaactgaaatttagaggggtttaagtagctggtttaagattacacaagcagtgagcaaatagagttgggattccctcacatgtctgtctgatcttgaactagttcttaaccaaattcacgttatccctctttgaggttatttgtctacactgcaaaattacacaagcaggagagcagcgatgtcttgtctacattgttcacagtctgagaaaatcatttcaagatttattgattggctatcctgattttaatctgaaaataagtcccaaatgacatgttttcaccttttatttttttaattcaaatcaaacttttaatcaacagcaaggacaataaaaggattaagcatatcattttaaagaaacacccaaatagatatgatttggaaattttcctactaacatttcatccctgagccccccctcatactgacctcacctttgggcctgaacttggtaaggagatttctctgcaagtctgtctagagagtcaaacacttctctggttaccttgagattcaagtctgcttaattaaatgttttagctagcatttttgtttaagtttccacggaggtatgaaaaagccattgcaattgttttaaagctcttataatactttctttagttccttcaaggaaggtgatcattcctgtgtctactcaggcccctatcccaccaccttcactgatggcttcatttccttacactttagctcctttctctctctgattttgcccatcactgtccatgtggaagaagcatgaagagaaatttgagttgtgttgggtctctctgccgactgcatgaaccctgaaagtctgtcctctcatttagaagttgttcccagaatctaatccctcctatcttccttctttttcttttcttttttttttttttttttttttttgagatggagtttcgctcgttgcccaggctggagtgcaatgccacgatctcagctcaccacaacctcctcctcccaggttcaagcgattctcatgcctcagcctcctgagtagctgggattaccggcatgcgccaccacgccctgctaattttgtatttttagtagagacggggtttcaccatgttggccaggctggtcttgaactcccgacctcaggtgatctgcccaccttggcctcccaaagtgcggggattacaggcgtgagccaccgcacccggcctgttttgttttctttattgggtggaggtttgtcttaagtttcccccacttctgattaataacctcaataggtctttgcttattaaaaaaaaaaaaaaacctactaaaagataaaaattaataactgtaataacggcattctcatagcatctagcaaccttcacaacagagttgtgacaaagagctgaattaccaaatctcagtttctacaaaaaatgttatccttaagaagaaggcagtagcggcctttccactcaaaagcattttctcaacttttggctataaacattttcaaaatcgcagaaaaaatttgaaagaatagcataggaaccatccgtatagttagccctgagtaattattaattttttgtcatattttatttatcatatgtgcgcgtgtgattttggattgctgtgttatgttgtgctgtgttgtattcctgaaccatttgatgataagttgcagactgcaggatacttcgcctctcaaatgtccagaatatcagtgatcccctgggtaaccacctaccactgatgcccctaagaaagtcacaatggttgccatcatcatctgctacctagcccacattaaaagcccccagatgtattaaaaatgtcttttggagctgtttgttttcatttttgtttctgttttttcctctgaactggaagtaagatgacaaccgtcccagtatgcccggacatgtcccagtgttagccctgaaagtccgagaaacatctcccctaagtctttcctaggcaaactgggatggcccagcaacctcaccaggaaccaatcaagtttcattgcacgtgtttactaaaactatttagtatttagtctcttttaattgatgcacaaccagctcttacccagaaaactcaagtttctaagttttatatctaaagatgtctcctaatacacacagtgagatttgttatgggtggtagttggggtgtccacagagaaccagcacaaacatccatgacctactcaccaatagatctagccttacaaacgaaaacctctgcaaatgaaaacactttattgtcaccacaacagcggtgtatcccttttgttttgctttgttttctaatggtctgatatttttgtgttcagaagttgttcacaggtgagctgataaatagaatcgtcaacgcaggcaacacgcaaaggcatgaaagatgggttatctgagtgcaggagcactcagataatgatgatattaattcatatctagataacactcagataatgttaactcatctttaacagacttcttatgagactgtgtcaagatgcaaaaggtggctatcagggagcctgcccctctcttacatcacacctgtggccagttcatccatgctggtactgtctgcaaagccctatataaaggaatgtgagaagcaaatgagacccatggttcaaggcccagctctgcatttaaattgaacagtgcagacttgctcaaaccatgtctcttctgcagactttagtgtcttcacctgcaatgccaagagctgctatggcctgaaaaacaaggctgctttcttcttcgttggcctcatttcaggcactctcaggaaagaacatctggggttctgaaccctccctcagattagaaggacaattcccccactctgtctccaggaagtcacctctttgacacaagcctggtaatccatggaaggtcaggaccactggcaatgaacaggctttgaggatgccatgccctgttcctgccccaggaaagtgcaaaggatgcacatggtccctaaccctcaagagtagccccttccattccctcccatgaactgcaaagactcacttcacttcatccagtgtctttatgaagtcttgcatataggtcagaagaagggttaagatgctggctgtaaactaactggactctaagctccagacttacattagttgccttctcagtaccttcaactggatgtccaagaggcatctcaaccttcagatgtcttcaacacaacccttcattcccttcaaaccactcctcccagccttacacaaagaatacagcagcattgctattcacctggtcactcaagacaaaaacctaggagtcgttcttgactcttctgtttttgccacacacaaatccaatccatcaactggtcaggtgagcgctaccttcaaaagacagctgcatttgtccccttcagtctttcccattgtccctctaactaataccgacttttgcccaaactactacaacaatcttccatatttccagcttcttctcttgttctcctgtctcatcactgctcagccaccaccaagtgacctgttataaaccataatctaaccagatcacttccttattcaaaatccaccaacatttcccaccacatttatgatcaattctaaacaccttccgttggcccatcctcttcccgtttaccttgacaggctcgcctcattccatgtctccttcactgacttcacaccagcccctcgaacctgttcatggatcctttcctcctgctgcccttggcacctgggctgcacttcattgtagtgccaccttcaccaccttcctgtcactctacagccactattactgccccacctcatgacactccatcctcccacctcacacaaacacatgtctcatagactagcatagggtctgcaggatgagcccgtgagaacaggcactttggtctgttctgtttatgaatgaatccctggtgtccagaacactcctgtttcaaggaggcactcaataaatatttatggaattcattgactaatggaacatcattattctaatgaaagcaaacaaagatgcaggtgataagcaaaaacgccttctgccctttgcctttcctgtggctgcttttaattcacttaaaaaatagatgtaactgttataaagacatcaaaccaggccataatgcatttctgtcataataaaatgtcaccctgtttattttatcccagccattaccacaatctgtaattatcttgttattttatgggtcactacctctttttgtctttcttctccactgggatggaaactcatgagtgcaagaaccttctcctactagctcagtgcatcccagtgccaagtgcatggactggcccatagtaggtgttcaatatgcatttgttgaatgaataattaaatgacagactaaccagaactggagatctcatgaaagacatcgtgagcttgtcaaggtcaataactttaatgtcttttcttctttgcaactcactagaaacctaacataatactttgtgcttagtaggagttcagaaagcttatttattgagttgaatttcactatactagcaaagtttcagagactacatgtcctaattaggaaagttttctggagaggataaaggcatggagaaggagtctgtcaggagactcaggttcccagcttggcaggatatagacaaagggctcagtgggctcatttgcattttgttttgcataaatatgcaagctgagtggctgagctggagtctccaaggatgtcaaatggcaacgggctgtgttttcaaataggatattcaggatcttacaaacacagggttcccacccaaaagaaggatcttcaactctcctggtgatggggagacacactgatctcttagctgagcaaatgtccctcaactggaccctccctatcccctggccactgccagccacttccccatgctcaccccctacagggatcttggcaagcctggctaaggtgtggtcacttccaacaggcccctgttgacagagcttaaaacaaacctccctgttcacacacaggccctggtgcatggaagagccaagttgggagactgactctctactggctgaggctaccagtgcagaaacctttcgaaaacaaaacagcacttaaaaaaacaaaacaaaacaaaacaaaacctcatcctttctgaggccaacactgagtgctgggaaggctcagaaagaccatgggatttttttccccccagttaatccagttgccctgatttgcatgggatttgcataaacagcacgttgtattcaagcggcccttacttcaagggccaagattaaggttggggatttgtcacccccacggtagttttgctccccctccgctgtttagcagctcaggacacctaaaatcgctctttatatactggccaaggtgaaaagcacacaagctatggtggaataccagcgcaggatagaggaggcgtgtgtagggctgggagccctctcccaagaggggaggttggacaataagaattgtaaggttgctccctgttctggaattctataaatctctgcagggtgccaggcaccaaaggactggcctcagcaaaccctgagatggcactggaaacaagatggattgcagccaaattcaggttgtgctaatatttgttgaaagcttttctgtgacagtgactgtcacatggggaaagggaagagacagactagattggccaggagaagggatgggcaaaaggaatgtggaattcttccatcagccccaccaccatccccctgctagcgagggagcagggatgggactgttaaaagccctacacttacaaacctctctcaatgtccagcccagctgtacctcttccctgtgtaagacacaagcacagagactcactcgttggcactggtcaaaagtcactttccaactttcgatgtcaggctcaacacaaggcgcttccaaaagggcctttccacccatggttggcactcccaatgttggtctttgaaatgtcctatggttttcggcttggaggaagttgccttggcccaagctctcttgagtccacacccagatcgcctaacttagtttctgcattgtgtcaagcaagatcacagagcatacgatgggtaataatcaccgaagagcagagcaggcaaacctgcagatgctcatgaagggggatgggccatcagtatccgacatctctgcttctttctccccagtttcctcaatatatgcaaagagcatatgcttctgatttctacagctgagtacctggtgccctaaatgtcctggaaaaccctgtcctgagaaaaggcaggaggaggggttggaaagagagaggatgggccctaaaaccttcctggcttggtttcctctacatgccaaccactcgatcttataaaatcatccaggttatctccctacacctgtgcaccatgctaaaggggaaggaaatgtggacaggagtgaaacaaataagcaaagccaaaataggggtatggggtcctaaccctaacccttgaaagctgtgcaacttactcaagtcatttgaactctcaaggggtttagtttgtttgctttattttctttataagattgggattttaaagtctgccctgcttatccttgaaagatagtccagaatcacaaagggcatcacacaggggcctactggggttagatgggcattgagtattgttattaccccaaacgaaggcatccctggaaaaacagactttcctaatactttttccaactggtttatacacacagttactccaataattctttttttttttttttttttttttgagacgaagtctccctctgtcaccaggctggagtgcagtggcacaatctcggctcactgcaacttctgcctccctggttcaagcgattctcctgcctcagccacctgagtagctggggctacaggcgtgtgccaccatgcccagctaatttttgtattttttttagtacagacagcgtttcaccatgttggccaggatggtctcgatctcttgacctcgtgatccacccgcctcggcctcccaaagtgctgggattacaggcgtgagccaccgcacctggccaagttactccaataattctaaatctgatttcccttaaacttcttataatctacttgatttttttcttttatttccttatttttctttcctggggcatctgggaggaaaggaactggggattcctggagtgtttctgtcacatgcagcctcttcggcagctggtaggctacagaggcctactccgcgtgggaggagggagatgcattgcatcattacctcattgtgttaagaaaactctgagattcaaccattctaaaataaaattttctcattaggagggaggtttttggctctctagtcttaaaatgcccaggaaccaaactggccttctaaagatgtggaacacaaagttccgttcccatttttgatgctgaccccctatgaagctcaggtgcctgtggacttcttagcctaactatagacaggttttaataactttaattatcctgcttcacttctctaatttctttctttcttttttttttttttcaaaattagcctgaaggctcaaaagattaaacttgggggaaaatttcctaatgccctttagctagctggtttccagtttacgccccagttttcctgcaaatccttgcatttgtactataggatgagcaacataccttggacttccttctgtttacacctgagaccgatgtgcaccagctatttatgtacagatccttgggatgcttttctctccaccatgaaatgttgccaaactccaggaactagggatatggggaggggaaaaaaaaaacgtattgttgcaatcccctcctcccccttgatcattaattgtatcctgctgggagccctccatgcactctgggtgagcatgtgtcaaacacatttccctcttcccagcacttgccaagggtgtgttagcctcttatttttgaaacctgctctttgagacatggagaaactcagacaggaggaaggagggggaggagattacagcagagcagcagcaggctggggtcaggctctgggccagagccttcgagtccaaatttcctccccggacaaaggatgggtgggggtggtcagctcttctgcagcgaccgactggtggctgagcaggcaggagggacccactgcggtgaccggaagttaagaggatacagacgcagttgaggttctccttaaatgatgaagtagctgattcttcctccaaatccctcttcactagttctgaggcccccagacaaccccagcagtcaagcactgctgcttcccatcccagatgttttgaattctgagagagcaaaatatgtagaaaaatccttactaggtatctattccccaccagagcacaacaaggtatgggaccaagggaccaggaaaaatcagttgtcttctattggaggaaggagcaggtgccatggtggaccctggaaactccattggggtttcctcagtcgacatagctcgtgcggaagacacttgcccttcaaagttgctcaggagaccgaagcatgagattcaagtctgcccttgcaattctcctaggcataaggttgtcttcatctgtcagcctgctcaaccttctcttctgtccagtcctagcactgtagaaagaaatcaaattattcttgcagattaaggttggttctcagagactccgcttctggaaaatgctgaaggatcatctactttttcccagagtcacgaaagggagatcaccaggcacagcggcatatgcctgtgatcctaggtactcaggaggctgaggcgggaggattgtttgaggacaggagtttgaggctgcagtgaactatgattacaccattgcactcccgtctgggcaatatagcaagaccctgcctctaattttcttttttaaagggtagccggggtgaacatgtaccaccatatatatatatatttttttattttggagaaatggggtcttgctatgttacccaaggtaatcttgaactcgtggcctcaagcaatcctcttgccttggcctcccaaagtgctgggattacagttggtttcatttcggcttctcacctttatattatcatccatgaaatcctcaaccttttatcagtctcatccctgggtggtccttagggtaagttgtaaaacttggtgggaaggagttatcactacctggtccagcatcacagggctactaagaacccaggctcataggcagacagatcttggtctaaattttatctgttacttgtattggctgtgtgatgtaccaatctgaacttcttgagctgtagggttgtcatctctaaatttattttttaaagattgaatgaggttatgtatgtaaagcacttaacacttggaatggcaagtagtgcccaagaaatcttactttactattgcaaaaaaaaaaaaaaaaaaaaagttaagactggtaatagtgacacctggaagcccctgttggatctgccacatctactggtaacatgtcctgaccacattgctcctgtcccccacccagcttaaggtcatctcttctttggattgacagcacacatgcccgttagctgcaagctctttatcatctcatgagaattcaacccaaagggagacaggcaagaataagccaaagtctgactctcctcagactctcgcttgatttccatgaggcacacaacccgcttcttcacgaacaggcgcagatgctcttcccatcacacacggccccatcatctgacatccctattggccaggctcttgaacccaagtcacagctggttccttgaggcagcctgaggcgtaacaccgcctgcaaagaaaacttttctctctgttgaaaatgcacagggccccctctgccttagtccctaccactcccccaacattgtcctactactgtttccgtgtagcgcatctggccaaagcaaacagctctcctgagccagctctccagcaagcagctgcaatacaaagttggcaggcattttcaggaagcctggccttcccccgcctgctcaccctgtgggctcccctggaagacacaagaaatgaagcctgaccttttaattagccctcgcacagggcctgacctcattctctggaggagctggaccgcccctctccactcccctgccctgctcctcatccgtccttcacatgttgggtgcctgggtactggggctagcttttctcctctctggggaaaacgcacattgtgaataggatgttaggaactagaggagtagttataaaggtttattagtgtcctatattgatgactgtgtattggagtttgaattgaggttggggacagatgaggatctcagatctaggagtaacgataagagggaaaatgggaagaacaaagagaggagaagagagagggaaggagggagggagggatgaagggaaggatttttagcaccttttgtcagtctgataataagtgttttcatgtgttttcttctttaaactctgtaagaccataggttttgatgatcctgattttataggtaagacattgagtccccaaagagaagtgacttgctcgaggtcactcagttggcagatggcagagcaaaaacaagaacctaggtcttctggctctgagactggaaacttcacatcaggttgctgctattgtccagtagttttagggttacctttataagataaattatttttttcagtcccgtcagctagaataatgcatccgtaggctcagtggcccccatctgattcaacaatctggcatgcattgttttggttaaggtcagctgaccctaactttggtgttcctgagagctacttggaggtggtaattgtggtagagagagtgggaccaaaagtggcagtggtggtggcggtcatggtgatagtggtggtggtgatggtagtgatagtggaggtggtggtagtaacgatggtggtggtattgatggtggtagtggtaatggtgatggtggtggtggtagtggtgatggtgatggtagtgttgatggtgatcactatggtagcgatggtggtggtgatgatggtggtggtgttggtggtggcaatggtggtgatgatgatggtggcaatggtggtgatgataacggtcgtaatagtagtagtgatggtgatagtggtagtgatgatggtggtggtagtgttcatggtgatggtgatgttcatggtgatggtgatgatggtgatcatgatagtagtgatggtggtggtgttgatggtgatggtggtggtggtgataatggtgaccatgatagtagtgatggtggtggtggtggtgatggtggtgctggtgatgatggtggtggttgtgttggtggtggtggcaatagtggtgatgatgatggtggcaatgatggtgatgataatggtggtaatagtagtagtgatggtgatagtggtaatgatgatggtggtggtagtgttcgtggtgatgatggtggtagtgatgatggaggtgttggtgttggtggtggtggtgttgatggtgatcatgatagtagtgatggtggtggtggtgatgatggtggtggtggtggtgatggtggtggtggtagtggtggtggtgatggtgacggtgttgatggtgatcatgatggtaatgatggtgggggtggtggtgatggtgttcatggtggtggcaatggtggtgatgatggtggtagtgatggtggtggcagtagtagtgatggtgatggcagtaatgatgctggtggtagtgttcatggtgatggtggtgttgatggtggtggtgatgatgacggtggtgatagtggtagtaatgatgatggtgatgagggtggtagtaatggaggcatgctcttgttactagcagcagtggtgggagtaacatgaaacatagatagaccagctaattggctttctcagtctctaaaatcctcccttgcattgcactccttgccttctgatcttctggtttgtagaaattggccagagctctgaccctttgtttgttggtagcagcatctgtaaaatgatatgacagtcttgtatttatttatttttgaaaggatgtaagggaaacagcttcccttattcaaacaaaacacaaagtccccaaggctttaaaactggaagctgattctccaggtggggagatgggggttgccagcaatgtcaacatggcacctgagtttctgctttcccctcccccatctctccctctgactctcacatccacagctatgtcagcctgggagtgaattactgtttgtccttcagagctctggcccaagtgtggccagctctctctctcttggcttcccttagcccatatgagagactggaatttaagtgtgggagagactaggaagagaaaaccaaaaggaagacaaacaaagaaaacacaggaagtttaggcagcacccagattacaaagctgacttttctgagccttcacagctaactcattcccagggctggccacctgtgtctcagtccacatcttgtctaataagttcaggcaaattgtactgagacaatttaagagacatctccaacggccacgctccaaggagcacccaacttgtctttatgtggaaggagtcaagtacttcccgtttcatactcctctcttcattttgtgcccccagagcccaagcaaagactacccatctcaatagctcacccagcgtggtcccagcacaccacagtttcatttgcctagatatctggcagcactatggcaaccactgaaacgaatgaatgcacctttcaggtgacttgcctggctcttatcattggcctgagagcataacaatatcactttcttcttcttcttcttcttctttttttttttttttaatgcacatctcactctgtcacccagcctggagtgcagtgatgcaatcatagctcactgcagcttggaccttctgggctcaggcaggcctcccacctcagccttccagcctcccaaggagctgggaccacaggtgcacaccaccatgcctcgctaattttttgtagagatagggtctcgctatattccctaggctggtcttgaactcctgggatcaagtgattcccccactttggcctcccaaagtgctgggattactggtgtgatccactatgccaggcctatgaaatcactttctaatgaaattatcaacattcacaaaaacacccaagccagccatcaccatggatggcttatggcagcaacagggttgaagagcttggtgaagggatcagcttcaatcatcccccttgattcccagtgaagtcaacatagaaaaaatttaaaagaacagcagtcttaaagctcaaaggagggtaattcaaacttccccagaactgcaaactgggttactttctttctttctttctttttcagatggagtcttgctctgtcgccaggctgtagtgcagtggcacgatctcggctcactgcaacctctgcctcccaggttcaagcaattctcctgccttagcctcctgagtagctgggattacaggcatgtgccaccatgcccagctaatttttgtatttttagtagagacggggtttcaccatgttggccaggatggtctcaatctcttgacctcgtgatccacccgcttcagcctcccaaagtgctgggataacaggcatgagccaccacgcccagcccaaactggttactttcatgataactgaatttccttttgaagcattaacacacatggtcaatggaggtgttgtgcagtgcacttttctcctcctttcagttggtggtgtgttccccgggtggttttggggaaatcttggcactgaatacaaacagccagtcctcactctgacattgtcagccaacgaggggtctcccagtgtgggaatgctgccctgagggtgttgcaagaccccccatcttctctgctcagcccctctcagctccacactttattttccaggactgaccttcttgtaactctcatgcaattgctccctttgggactcttctagaaacacattgataagggacgagaggatgagaagatggaaaacaagcccaggaagaatatctggctcattttttcctttgccgatcaagtaacaatttatgcctggtcaggacagacagcagattttatttattttgctagcctcctaccctattcccatcccaggggtggggcggggtgggctgatattttctttcaaggctatactaaaaattccagcctccctcctgattctaaccccaggattaccatttcaggcaggcaggacctccttgtcattcagaagacagctcccgaagccagcctctccccactgcaatttggagcagccttgaagcatttagaggcccaggggtcgggggaggtacaagatgttctctttttctctcctatctctcaaatgtgttgcttcaagactgcagttgtttctttttagcagaacatcgctgacgaaactcctgattgtcccctggtgttatcactccctgtcacataataagccctaatctttctccagaagtaaaactgtttccatgcccgatcccttagctggtggtttttttggaatccctccagagagtgggagtagaggttcagagggaaagatgataaagcctggaaaatccgctgcctgggaccttgagggttaagtcagcccagatttgggagaagaagattggcattcccctgatcccagatggagaatactaaataactcccttcagcaagtcaacttgtttggttatcttggagtgtggattggggctaactcatcctggccagtccttccggatgtagccttgctcaaaatcaagccttttccaggagtcttgttctctggggctgcctcctcccaggctgataaagagtttcatcatggatgattcaagaggttgagatgcaagctgtggtgatagctaacgatgcctctagcccagctgacctcactttctagctgttgacaggttcagtcaggctggccaaacagcttccaaccaggccaagacaaatggtctcgggctttcgcacccccttatccctccaagtccttcttctggatggcagttcacctctgagagtccctgcagatcatctggagtccaccccttctcccataggcaaatgcatagaccaggataaataagactgctcctattttccatgccccacgtcatgatgatctcgtcagaggctggcatcaccctctggtccctccttacttcttcccagagtctctccttcccactcgaactgttccggacctgagtaggtggtttggagtcctgactcactttaaaaagcatgcagtaggcccaatcatcttgtgtgtgtgcagagaagactttaaactagttctcacacacacacacacacacacacacacacacagagacacccccacacacacagtgcctccagcctcttctccagccagggatatgatgggaaatggaggcctctttatcatccacgcagtgggtagcattgagggcctccagctcctggggaccactcaactcctcagatcctgaatacaggactggaagagaaaagagataacaggcaaatctgaagtctccatgcagtgaccagacaggctggctcagacaggacacagcgttttctccatgacttctagagttaagcatcactctggaaacactggaaggaacaggaaatgctggggacatgtggggaggaatcataccccctttcacccacacagcctatttgtcgggaccagggctccaaccaatgtgaagcttgggttgtatccacactgggctcaaggctgaggctgaagcggcgccagctgctcgtgtggcaattcggtccacagagttaaaccccagggccttcataataatcatgaatcacactccctgactgctgcatgacactctgcagttcttaaaatgcttcttacatacattgttcagtcctcatgccttgcctgtgaatgaggcattatgacccctttttcttttacagagatggaaactcagcttagtaaagggcagaaggaggatacaaacctggaacctccagctccagatccttcgatcctcccctgcagagggaatttaactgtacttgagaatggataacgctttactgacatggggaaatgaagccttctaggcacaaagatgaggtcaacaaaggcaaggggcaaaacagtggaggatgttttcttttaagatttgtgtgtgtgtgtgtgatggagtttccctcttgttgcccaggttggaatgcaatggggcaatcttggctcaccacaacttctgcctctcaggttcaagcgattctcctgactcagcctcccgggtagctgggattataggcgcctgccaccacgcccggctaatttttttatttttagtagagacagggtttcactatgttgaccaggctgggtctcgaactcctagcctcaagtgatccgcccaccttggcctcccaaagtgctgggattacaagcatgagccaccgcgcctggtcttcttttaagaattttttaaaattgttttgcagccgagctctgtgattcgcacctgtaatcccatactttgggaagccaaggcgggtggatcgcttgtgcccaggattttgagaccagccaaggcaacatggtgaaaccccatctccacaaaaaatacaacaattagcagggtgtagtagtgtacccctgtaatcccagctatttgggaggctatggtaggagattgcttgagcccaggaagttgaggctgcagtgagccatgattgtgccactgtattcagcctgggcaacaaagcaagaccctgtctcaaaacaaataaataaattgctttgcctcagcacattgtaaattttttttttttttttagacggagtttcgctcttgttgcacagctggagtgcaatggtgcgatctcgactcaccacaacctctgcctcctgggttcaagcgattctcctgcctcagcctcctgagtagctgggattacaggcatgtgccaccacgccccactaattttgtatttttagtagagacagggtttctccatgttggtcaggctggtctcgaactcccatcctcaggtaatccgactgtcccggcctcccaaagtgctgggattacaggcatgagccaccacgcccggcagcacgttgtaaatttaactattcattccgttatgttgttagtccacagttatggcagaaattgtttaaatatatctatagagagagagagagagatagatatgtatatgtattatagcacttcctgttccttccagcaattccaaagcaatgcttaactctagaattcatgaagaaaacaccacatcctgagccagccagcctgtctggtaactccatggagacttcagagctgccttatgatctctctcatctccttctagagttgttttattcctttacatatacaaatactatatgcaagcatcatatatattactccataacttccttttcccttagaacatagaaaaatgctggaaatatctttccatgtcaggaaataagtgtgtattgtttttgaatggttgcctagtattccattgtattgatattattggacactgatactgttttcattttttagtcattgcaaatgatgctgtaatgaatcttcttctgcacatatctttgtgcagatgtttgatcatttccttaagataaattcctggaagtggaataacttggtccaaacacaccatgaaggttttttatatggtttggctgtgtccccacccaaatctcatctttaattgtagctcccataattcccacatgttgtgggagggacccaatgggaggtaattgaatcatgagggtggtttcccccatactgttctcgtgggagtaaataagtctcacgaggtctgatggttttataagaggaaacccctttcacttgggtctcatttctctcttgtctaccaccatgtaatatgtgcctttcaccttccaccatgattgtgaagcctacccaaccacatggaaatgtgagtccattaaacctctttttctttataaattacccagtctcaggtatgtctttatcagcagtgtaaaaattgactaatacagttttcaatgtatttcaccaaaggatgtgcctttttttttcttttttttgagacagagtttcattctttcttccaggctggactgcaatgcatgatttcgactcactcactgcaacctccaccccccaggttcaagtgattctcctgcctcagcctcccgagtaactgggattataggcacctgccaccatgcccggctaatttttgtacttttagtggagacggggtttcgccattttggccaggctggtcttgaactcaggtgatccacctgcctcaccctcccaaagtgctaggattacaggcgtgagccactgcgtccggctaggatgtcccttttaatagtcccagctacagaaagctcagtcaaagggcacactagcagaagaggaggtctggagtcagagtgcaagccatgtctgggggaaacttgtgtgacagtaagcaaaaagtgaactttgatttctagggattaaagaggtattaaagtttttgagtacaggatgacttggccagaagtggcagaggcttcaggaaggacaaagtagggggtaaggagtggagaagaggagaagaatgaggaaaagatagaagaggagatcgggcttggtggctcatgcccataatcccaacactttgggaggccaaggcgggtggatcacgaagtcaggaggacaccatcctgtctaacatggtgaaaccccatctctactaaaaatacaaaaacttagccaggcgtggtggcacgtgcctgtagtcacagctacttgggaggctgaggcaggagaatcacttgaacccaggagtaggaggttgcagggagctgagactgcaccactgcattccagcttgggtgacagagtgagactccatgtcaaaaaaataaacaaataaaaataaaaagaggaggaggaggaagatgagagttatgtcatacaggggagtcattaaagatgatacaaagatttggagtctgagcaactggaagataaagatgccgtcaaagccagagaaaatggcaggcggaaattttaagagaaactcaaatttgtttttcaatagtttgtacccatccagacagctgtctctcagagctggttgcttaggagagggatctgggttagaggcaaggtttgagattccacttcagaattcacagttacattcaatggtcatttggagctgtgaaaaaaaaatatatctctatatatatagatatatacacacacatatatatatttatttatatacgtatatatatttaaatatatatagagagagagaaagagagagagagaattcagttacagctgtagaagtagatgacatggaagaacaatatgaaaagaggggccaataccaccttttaaagagtgggaggaaacaaaagaaccaagaaggatgatccaaaaagtaccagcagagacaggaagagaacacagcattccttgcaatagaagccaaagagaagaagttctagaggaagggtgatgttgtaaaggatgcagaggccaaatagtgcaaatatgaaggagctattcaattgggccatgctggtgagttcctcatggaatgaaagagagggtttcatctagcgtttcatgaatctgggaggaacttcatctgagcctttgcgaagggcaaaggtaggagtagatcaaaactaagggttcaccagaccccaaccagtggcattcacaggcctggccagcaatgaatgtttccactgaactcccggcttgacctgtttaagcctgacattggggggtagggggccagtgtttttgtgaatgatggaaatgaatgcacagcatatggatggggcccaaaacaaaacaaggagcacactcatgctctgtttaaggcaggggcacagtggtagctctaacgatttttaagtaaaattccaaccccgaataagaaagatcacatcttagagtatattatgggatggttatatctgaattacttgcctcttaattcaacaataaagtaaaggcctttgggctgatacaaatgccacgctccctcctaaaacataaaatctgaattacagaataattccggggaggtgggcattctattaccatctccatgccttggctggagatgccttggctgtccggttccatcggtgacatgtccccacccccagtttcagagggtgggggcagcccttcagctgaatccctctgctctgcttctccttctccaggacacaattgagagtacacaccaggcggcacaaaacagtggcaactggccaggtggggtggctcacacctgtaatcccagcactttgggaggccaaggcgagtggatcacctgaggtcaggagttcgagaccagcctggctaacatagcgaaaccccatctctactaaaaatacataaattagccgggcatggtggcgcacatctgtaatcccagctacttgggaggctgaggcacgagaatcgcttgaacttgggaggtggaggttgcattgagccaagatcatgccactacactccagcctgggcaacagagtgagaatgcgagactcatctcaaaaaaaaaaaaaaaaaaaaaaaaaaccagtggcaactgatatgacaaatggattgaaatgctaccacgtcccctccccactctccattaccacagagacaccagccaaccaaagccaggagataaggaaatagccataaaggacagtccggtggacacaggtgctcagagaatcgatatgccaacaagattcttcaatccatccaagttccgaaggggaaaggatgtgagatggggaactggggtcaaagttgcaaacagaccagttttgtccttaggacaagaggcctcccttctctctaattggagttgcatcagtctgatacatgttgatcccacacaccaaagttcttttcttttcaatttccattcctaattttctcacctgcctcgcctgcaatcctggataacctctaagatggacagctaggtatatgctcaagcagccgtgaaaccaggcagaatgattgggagactcagtcacctgcaccttctccttcaaccactttgaaaagtagacaagggccgggcgcggtggctcacgcctgtaatcccagcactttggggggccgaggcaggtggatcacaaggtcaggagatcaagaccatcctggctaacatggtgaaaccccgtctctactaaaaatacaaaaaattagctgggcgtggtggcgggtgcctgtagtcccagctactcgggaggctgaggcaggagaatggcgggaacgcgggaggcggagcttgcagtgagccaagattgcaccactgcactccagcctgggtgacagtgcaagactccgtctcaaaaaaaaaaaaaagaaaagaaaagtagacaaggcccaactaccatcacaggattttttcccacttgctccctttaggacaagcagtgaacatatcctccaaatgtataggcagaaaggcatctctttaaaagggcagagacccaaaagttggaaagagaaaaagggagacaacttatattgtggtttattcctcactaatagttttctgggcaacaggaagccaatggtcaaatattaactggagttgtaccacagcccaacaggtctagtggacataattttccccaaacaactgtgatcagacatacacatggaaggaagggaggaaagaaacttctcaatcactcctacttctttttaatgcaaatgacatgttcctacttaggtgccttggaactcagtcatttgcattgttcaaattctaggtacctgccataagtcttataacaagccactctccacaatcaccccacaaaagctacaggacagcctgtcactctaagctttcagatcagtgctttgttatttcagtaaccataaaggtcaagacaatgatttttggagtcaattgccaaaaacctagcaggggctcattgcttatagaaggcactcatgctggttggtttaatactgagaaattttaaagccttactgtagtagaaattagagttgaagccccagcaatccttctatgtttcctcaattgtgtagtagtcatgcgattaaatggagattgaccccacccagaagcaaggttgaaccaatcagagattggattcttgtcctcctgccataatgattggtttgcaataagtaaagtctgtgccaatcaacatatggcatttccatatctgactcctgagggaagattttggagggtttctgaggaagtaagtctctaactttgtcagagagagctaccgaaaccaaccttctcactctaggagtggtttgatggtaataaacgtagagtgttagccatgttgccactctaaagaaaactggcctgaagataaagatggtaccaatgtacacaaagcaaagagaaagtaaaacaggtccttaatgacttcattgatctgtttggagcaaaccaaccctgaattccacgttactcattatccttccagtagagtaagtcaatgaaccccctgcattgtttaagccagtttgaggtaggctatctttttgtttacttattttttaaaaaataagtcctagtaaatggtttcaattttttaaataattaaagatctttaccagtatacttacccaaactgtcatctgtttgacaattttgctcttaatgattaacaaaagtaagttttggagccctggagactgagatgaaaaatgaaatctcctctttggagaagtataggctgaggagtccacaaaactgtcctgccaggcttatattgtccaaggtattgaagtacaatcaactcttagtggttcttgttgaagcatggggggaaatgtcagaggaaacagcaatgtattatatacactctggaagactgattcatctttatatgtggctaaagctggtattaaaatgaatttgcattctctgagcataaagtgtagaccactgtgaaagacagatgtcaagggtggctatgtgatcaaaacagaaaatggtaaggaaattaaattttaaatgaatattttaaatgtaaataatcccaatactaattgctaagagaattttaggcattctattggaattaacctatttgccatttagctaaaacaaagcatgaactagatgattggtctgcaaaaagacttcctagttattctgacctgttacacgagcaaaagtactgacaagttgatgccaaatgttccttttgaagatttcatgatttattggctatattcccctaatccagaaattaagttgtactttgttcttcggttctctaaaagtgcagagtcaagaaaatatgaggtgttcaagaaataatggttattttgttggctggatagatggatgaatgggttgatgacaggtggatagataaatgaatgggtgggtagatggatggatgaatagacagatgctaggtggagccgtcactggaaataacactaatccatctagtcctaaacatttttccccaaagcaggaagtctccagttctagtcccaaacatattctccaatagcagttatcatttgccctggccctataattgttatgctcacagatacctcaaaagattcatgataagagactacctctagtatcttggccttacctgttccaggatctaatacatttatgttttattatttttttcctcctcagataaagatctgtatgtgtcttagactcactgaattccaaaccaatccatgtcgtcttgctgactcctctaattttgttaacagaaatgccattttcctttgccaaggctccaaattagaaatcatcattgctcctcactgttcatttgcccccctcatgcaacttgcaagcccttaagagcccacctcttcgttgtctttcataaagctcccaccttgccatgtctactgccaccacctactttagggcctcattaacttctcccttaaacggtatcaattgcttctaagttgatgtcctgaattccaatttttcctccaccataagaaaataggatactattttttttttaatactttaagttctaggatacatgtgcacaacgtgaaggtttcttacatatgtatacatgtgccatgttggtgtgctgcacccgttaacacatcatttacattaggtatatctcctaatgctatccctcccaactccccccaccccacgacaggccccagggtgtgatgttccccaccctgtgtccaggtgttctcattgttcaattcccacctatgagtgagaacatgtggtgtttggttttctgtccttgcaatagtttgctgagaataatggtttccagcttcatccatgtccctacaaaggacatgaactcatcattttttatggctgcacagtattctatggtgtatatgtgccacattttcttaatccagtctatcattgatggacatttgggttggttccaagtctttgctattgtgaatagtgccgcaataaacatacgtgtgcatgtatctttatagcagcatgatttataatctttgggtatatgcccagtaatgggatggctgggtcaaatggtatttctagttgtaaatccttgaggtaccaccacactgtcttccacaatggttgaactagtttacagtcccaccaacagtgtaaaagctttcctatttctccacatcctctccagcacctgttgtttcctgactttttaatgatcgccattctaactggtgagagatggtatctcactgtggttttgatttgcatttctctgatggccagtgatgatgagcatttcttcatgtgtctgttggctgcataaatgtcttcttttgagaagtgtatgttcatataggatactatttcagtggaaccctttgttcccattgaaatcttaatatggaagaaagcaaagttactctggataatgctggaatttaagtatagaagccagcaatgctttgctctatgactgcacccaatgtagtaccctagagctgaggcctcactcctgctgctgctgctgctggtggtgctctctggaaggctgccgagttggtgcagaaagaggagaacttggagatgccaaaggatgtcccttagtcctcattgggctattgtcacttctatagcctcaaagcaatggagcaaattctccataccccaacactgggtctcataatgtcacctagatatacctcatttctgactttgaacttctgcttgcagctgctttttctatagggaatcaggtttgcatctggggccaagctagggaatggtcaccattctgtttgctacctatccttgtttcctcattgctctccaagggaccaaaccaatcccctcatatcgtagatagatagatagatagatagatagatagatagatagatagatagatagatagatagatagatgatagatagggtgggtggatggatagattgatacatagatagattagatagatagatagatagatagatagatagatagatagatagatagatagatagatagatagattttaaaatggatatgaaaatatctggggatttcactgacccaccaatttatcagaccaaagcagtccaggacaactgctataatctgtatctcaaaacttgttttctgaatggaaacttgaagatcgcctttaatatttcactctttcttccaggatttagttactggttatactggttccacctcctcaatatctcttgtatttgtcaccttctggccatccctgttgttcatcaccccactttagaccctcaccatttcatgcctggactattgcaatagcctgctgataggtctctctacttcccaaatcacctcttcctatccatttgctcttaacattacagttgaaaaatataaacacagctgttttattcctcagtttaaatttttcagtgattccctttggcctagggataacatccagactcgttttattatctggctcttgctcctgtattggtttcctgtactcttgtctccccagtaattcttttgcaaattggccacatcaccctgtccccattcacaggggttgagaggagatgaccatgttagaacatgaacctgccccatggccagaatcgcccagttctgtgtgggcatttgaccatggttgggtcaatgagtttccttaccaggaatattttttttttattattgagtttcgctcttctcacccaggctggagcacaatggcgcaatctcggctcactgcaacctccgtctcctgggttcaagcgattctcctgcctcagcctcctgagtatctgggattacaggtgcccaccaccacacccagcaaatctatgtatttttagtagagatgaggtttcaccatgttggccaggctggtctcaaactcctgacctcaagtgaaccacccgccttggcctcccaagatgctgggattataggcataagccaccatgcccagccccttaccaggaattctatgcaatgccaaactcaggaatggtttcaatctctgttgtccaccatgctttacaggaacctcctatgagacagaatgatggagccaataaacacagagaagtggaagcagggccacaaagaggaacctgatcatgcttgaagctccagtttttgtatttgcaaccaaggatcctaactatgcacccacttttattgtcacagctccctgaagtcaggtctatgtcttaattatctctgttagcctcagaacctagcttattgctagtgctcaaagtttgtcgaattaataacgaatatgataccaaacatcactttctaataaacttcttgtggctgccctcctagctcagaacccgagagagaaactacataacgatttgatttcaaagacatttgcagctttcacctcttctgtgtctcctgagcagtagcatcttctgtttggagagagtttacggcatcagagccacagcagcagtcatttagtaacgcctgtgacagaccttcacacgcactatctcctttgatcctcagcaattccatggggtcgcgctgtaattatagccagctctcttttgacagatgaacgtacccaggcctggagagatgaaacaacttggccagggtttggtcaaatggagatgccgcagtccagtgcaggattacccagctccaaatccaatccccttctgctattgctctgaagccttctcagcagacatcctgaactgcttggctctgtttttagatcagaagaagcctcagagcgtgagcactgaagatccctgtccctctgtctcctgtcgcttctgccaggccgaaaaaaagtttacccgagcacctgggtggacggtgaatggtcatcgtttggcagcctttactgctggcaaagtggaattgcatgggggtggggacactcttgattttccaagaatgtccctgctgtgggacacaatgtgcccctcccctattcagcattgaccgccctcctcatccatccacagaaaggtacttttaagagttgccattctgaggaaggatcgggcaagtggagggaactcaggagtgggtaacaaagagttaaggccgcagctgccagcacatgcagtgtcgagttatgctcaaactgttcccactggcgaccaagtcagctgtcatcagagaacaaagaatcccccagagccgctcaagttgtgtcacacccgggaagccctgagagctccctgattaggatttctaaatcagccccatcgaggcctgaagaataaagctgaggaacaatgagcctgccacattcacacagtcagcagtcccggccgggctgcccgcctccccaccaccaccccctcccacggggcctcaaaggccacttcacctccatcgggaaaatcaaatctcatcgaaagccccgagcccactggggcagcatccagagagcttcaggaggagtgtgggggaatttgctgcacagactccagctgctgtcagggtggtgggggtgggaggtgtgaatagggagggatctggtccaaggatgagggggtcctgaaggccaaatttgggatttgggaagtcagattttgctgttcttgtttcattccagccaagtcccagtgattggagttttgggctggactcctagaaaacctcaccctgaccatgagccccaagccttagaacttctcttggatcatagttaaggctaataaaggaccaggagtcctacagcattagcaagatcgtgatgtcaggagaattcctttacccagccaatcctacagcaagacagggcattatgtccaaagcacccttaagttcagggttttgacttaatctccacatgagaatacatcattgcgattctgagtgttgttgaaaatgagcgtgcatttattcaacataaatgttttaaaaataccaaattattacaaccttgaatttgtaaatatttttaatatactgggatcctcaagaaaagcacatgtggaacccctcaaattctgaggggtcctggttttcattcaaacttaaatgcttttcctttttttctatcaacgaagtcgttgcctgggacagtcttgcagctccaggtgtcatggggtctctaacagggacgctttagggaacttgtgctcttagggggaacctgttgctgcagctgagaaattctggctcttcccttctctgtgtgtggctgggtcagacctggaatctgtgggtagttcactgacagtcgtcagcattcatgatccctgcctgcatgatcccatttctgcatggcatggcacagggaagctttttctgcattatcttctgcatcatgcctttcaccaactggaatcacaaggagatgcacctgcatctgcagatctctgctatttttttctgaaggagagagtggaggaacacatggcctgaactcctagaccatcttctacagctccagctctgagatccgaaagccagagggaaaatgatcagggtcctttgcagcagaattattccaatgactggttttcaactgcagaggctgtttaaggaagctgagtgtactcagcgtgtgaacatgccaagtgcatcgtcactccaaggttggcccaaaagtatatgcctaaaatgagaaaatctatcaagagcccaaatgtggcaaagaccctcatatcaataatacctgctaatacgggggcttgtcttatgtgttaaggatggcttgcaatttatacttatgatatttaatcccccaatcctattttatagatgagaaaaatgagactcaaaactcccgtaaggccatataagtaataaacagaaaagtattggcagagccaagatttgaactcaagtctgtctcctcgctaagctcttgatcagtaagtttcctggatttttttctcctcagttgaactctcaatttaaatgtaaaagtcttcagtttgcaaagtttaccttttcttcttctgtatctcagtgctagtgaagaatggaacaagatccaactaccatcagcagaggataaccctcactgtcgtggagcacagggcatggattcaggtgctgacccaatcagatccaaagctaacactgctgctaagagactgagccactggagctagtcacctgccctctccaagcctcagtttcctcatgtgtgaaagtctagcaataatatcaatttcactgggatataatagggaatagcagaagctggagcagaaatacgtggcccatgatacatactctgcgggtgctagtttcctacttcttccttccacaggtaaaaaggtaggcattaactctcctcaagtcatgctgctccaggttaaataaccctccagaaacagttccatctttttggctcttttttgggctatcttttattcctcctttaccttcttgaaacttggcaggactgaccaataagaaatgttgcctaaagatgagctttcagtactctggaaattaaggtcaagctgctgtgttgctctcataacctggagtataaatctgcccttgatgtttgcagaaatgtctccaggcttgccaccactatttatagatccaagaaatgacaaggggtgctaactgagaaggagatctgttaaatgcaggagggttaatctgaccatgtgattgcaaaatgcatttgatgacaaggacctctgcacctttctccagagttcttttaagttgtctcagtgagaggcactatagacagtgttgttaggctgggaactggggggctcagaccctggaaagaagccactgggatttgctgatattggtatccccaatttctgttcagtaaccgtcttcagtggatttttaatatttctgatgggttggatgaatgagtgaagaattaatgaatgatgtggacaccctaaaccaaggctttttctttatattattattattattattattattattattattattattattttgagatggagtgtcgctcttgttgcccaggctggagtgcagtggcacgatctcagctcactgcaatctctgcctcctgggttcaagtgattctcctgcctcagcctcccgagtcgctgggattacaggtgcccgccaccacacccggctaatttttgttatttttagtagagacggggtttcaccattgttagccaggctggtctcgaactcctgacctcaggtgatccacccgcctcggcctcccaaagtgctgggattacaggcatgagccaccttgcccagccaaccaagactttttctacccccaattaaatcctgtttaacgacatcagagtaccatcaaatccctttttccacatttaattttaaaatgccagctcaactcttaaaactaatgaatttctaactgatgttgataaaagcaaagaaaagacttcacaaaattgttgatgtaccttaatgactggcaggacagcagaagtgtggcacaactggccagatgctatggacgtgatggagccagaacgctaaggatacgtcaaaggtggaaggaagaatgaacaaaagacctgaataagactggattgttgaagacccaccagtgatcattttatggcattaatggagagcatagaatttaagaactcatggtgcaagacaattatttgatgtaattaaaagagcagaaattttaaagtcagacaactgagagtttgaattccaacttggccacttactgaataggaaaactcagtttcttcatctgtaaaatgggcaaatatgtactttaactctcacaagactattatgagaatcaaatgaaataagcacacatatctagagcctggtataatgagataaatggtaatactgtgggtggacagaggttaggactaagaaacagatcaaaggatgggaagggccacaggaatcatgccagggtataggggggtaagattggcagcaatgaccatagcagtgactgttcaagaggtaaggatgctaggctaaaaattggtctcaaatgaccagtcatgagattaaagccagaaaggaagagacaggaaacatctatcaacaggggaaacagattatgaacaaatacccaggaagggaaggacgtggtctgatttcctccagggtgctggctcggccatagggagaggcctctctgatgggtgccatggccctgggggcaggatggtcttggtgcaaactgtaaaataactcgatatttgtctttggtgctattgtctccctggtccgtactttttctaactcctcattttaccctcattcccagaacccagtgattacacactatctccttctccctgatataaaacctgtcttccaaacattcattcaaacatctctgccgcaggatagatggcaagtgaaggtttaaaacacaagcccggtcccacagttatttacatttgaaagtcaattaaacaagaaagttggttctgcaaacgttcttggaactctgctttgtcccatgcactgagacaggcactgaaaatacgcaggggatagaaatgcctctctccttggattaaaacacggcgtgctcatcatgggcacctgggcatgttagctggtcggtcctctcagaatcacctgctcctcccaagggtaagaagagtcccagacacggcctcaccaggccccctcctgcacacatcccacctggggggagcgtggcaattgttccctgttaactcagccctccctgcctcactgcagaggggaagcagccaggggggaaagcaggggagagtacactggcctgggaagaggacaccagagttctagccctcagtcctcttactcacttgttcttccaacttgagcaaatcatcttcactctctatgtttctctttatagaaacaaagaggtgtcttcagctccaacattctagggattcatagggatggcaagtcatattggctctgtgaccactttgctttttaataaaattatgtatgcagtcatgcctggaatagcaacattcagtcaaggacagaccacataaatgatggaggtcccataagattataatactgtattttttactgtaccttttctgtgtttagatacacaaataccatcgtgttacaattgcctacagtattcaatacagcaacatgctgtacagatttgtagcctaggagcaataggccatatcctatagcctaggtgtgtggtaggctacaccatctaggtttgtataagtagtctatgaagttcccatggcaaaaatctcctaatgatgcatttctcagaatgtatccctgttgttaagcgatgcatggctgcatacacacacacacacacacacacgtgtatataagtattgtatatatgccatccatttaattatatgcctacatatatgtatgtatgtgtatatagacatgtatgtgaatatacatatatacatgtacgtatataactttttgaaaaagcagtcatcagagccaataggaagagagaggagcatagatttgggaaaacagtgctttaaagtacagacatcttctgttaagaaaaagtgttcttttttttttttttttttttttggagacggagtctcgctttgttgtccaggctagagtgcagtgacacgatcttggctcactgcaacgtctgcctcctgggttcaagcgattctccggcctcagcctcctgagtagctaggactacaggtgtgcaccaccatgcccagctaatttttgtatttttagtagagacggggtttcaccacgttggctaggatggtctccatctatcgaccttgtggtctgcccacctcagcctcccaaagtgctgggattacaggtgtgagccaccgcgcccggccgaaaaagtgttcttaatcacagaataccttccccataaaaaagccaaggacctacccaagccagttagaatcaagaatgtgtttgctactctttaaaaagtaccatcattttagagcggggcccctgggcacctgcattcatttccctggtcccagtttaaacagggctctgcaacagcttgcaggttcactgccccaacctgttgtgctcaccatccctgtggtgcaggacagtgctcgttgtttctgggctgcgtggaggaaaatgtagcatttggataaaactgtaaaatgagtgaatgaattggtgaacttcaatatcaaaattaatgatgacagtgatgaatgctaaggaagctatctccatacaacaagtgaaagaagggccttcttcatccctggccacagacagaattggagggctccagcttcattcttgggttcacagaattcccaggtcagcagtgaccttaaagcttatccagtcccagcttcccagcccatctgatacaggtaacttttctaaaccacgctaataagtagtcttcgcaatatttttgcaatatctgtcacagttgtgcagatattgcaaacctaaatgtgttaaagtgtggaggcaaatatcaaggcattaaacattttttggtcctgcatttatgtaacactgcctactaaatgagtgtctaaagaatgtacttgacattccttaggaccatgtgcagggaatctttccttcagggcaaaacccaaccaaaataacatggagcaggatagagcttattttccaagtgtttctgagaaattcaagggcagttgggaaaacatggagccttactagacatccaagtacaagtccacctactctccctttcggaagaatcttcacccacagccccctgcactagacagtcaggtagtctgtgcccaccacacaaatgatagctaagtagatcgcccccgaccctcaggcaagcaattcaattcaccaagtgaacaaaagatgagctgaacccagcagattccacccctgggcatttaaggattagaaaatgcagataaagatttgttgctaatcagctggtggagtacagtaatgaggtgagaaagcagagtgccctcctggctcagcgtggggccaaccaaagtcacgtacacaacgttatagagtagcagaaactacaaggaaatgcagcagagcaatttggaaaagggattgggaagcagatagattgagaaaagcagaaaataagagacaatttggcccccaagagatgggagagatggaaaggccagctgataagactttccaggctcagccctcaattctcgcagggcccagcagtactaggctctctgtgtaaatcaggccaagtgcacatgaaacacaggcactaataatacaggttacattaataattctacataaaaacttcaaagcgcaaagtatgaacatttcaatatgttatgtcattgtgccacgcttgttatgtcattgtgccatgctcgttcagtaccttcacatcctccatgtacttactttctcaggctaatgctctggcctattttatatgataatgtcaggagatcagggacaatttcttttttttttttttcttttttatagtggcagacagacatggttttatttattttaaaaaaaaaaactttatgggtatatggtagtgtatttatttatggatatgtgagatattttgatacaggcatacaatgaatgcataataatcccatcagggtaaatggagtatccatcccctcaagcttttatcatttctttgtgttacaaacaatccaattatactcttttaattattttaaaatggacaataaattattgttgactgtaatcaccctgatatgctatcaaatactagatcttatttattctatccaactatatttttgtacccattaaccacccctactccccaccccacccactacccttcctggcttctggtaaccatcattctactatttccatgagttcaattgttttaatttttagctcccataaatgagtgagaacatgtgaagtttgtctttctgtgcctggcttatttcatgtaacataatgtcctctaattctatccatgttgttgtaaatgtcaggatctcattcttttttatggctgaatagcactccattgtgtatatgcaccatattttctttatccatttgtctgttgacggactcttaagttgcttccaaatcttggctattgtgaatagtgctgcaataaaggtgggagtgcagatacctctttgatatactgatttcttttatttaggagtatatacctagcagtgggattgctagaacatacagcagttttatttttagttttttgaggaacttccataatgttctccatagtggttgtactaatttacattcccactaacaatgtagaagggttcccttttctccatatccttaccagcgtttgttattgccagtcttttggataagagccattttagctgggttaagatgatatctcattgtaattttgatttgcatttctctgataatcaatgatgttcagcaccttttcatagacctgtttgccacctgtatgtcttgagaaacatctattcagatcttttgctcattttttaatcagagtgttagatattttcctattgtttgagctccttatatttcctggttattaatcttttgtcggatggtttgcaaatatttcctctctttctgtgggttgtctcttcacttggttgattgttttccttgccatgcagatgcctcttaacttgatgtgatcccatttgtccatttttgctttggttgcctgtgctttggggatactattcaataaatctttaaccagaccaaattcctggagggtttcctcaatgttttcttatagtactttcatgcaagtttgaagtcttagatttcagtctgtaatccctttttttttttttttgtatatggtgagagataggggtctagtctcattcctctgaatatggatgtctaattttcctagtatcatttattgaagagactgtcctttcccaaatacatgttcctggtacctttgttgaaaatgagttctctgtagatgaatgaatttatttctgggttctctattctgttccattggtcgatgtctccattcttatgccagtgccatgccattttggttacaataactctgtagtataatttgaagtcaagtaatgtgattcctccagttttcttctttttggtcaggatggctttggctgttctgggtctttcatggttccatatatattttagaattattctttccatttcagtgaagaacgtcattggcattttgatagggtttgcatttaatctatagattgttttgggtagtatggacattttaacaatattgattcttccaatccatgaacatggaatatctttccattttttggtgtcctcttcaatttcttgcatgaatatttttcatggtagagatcttttgcttctttagttaagtttattcctaggtattttattttatttttcactattttaaatggggttattttttaaatttctttttcagattgatatgtgttggcatatggaaatgctacagatttttgcatgttgattttgtttcctgcaacattctgcaagctttactgaattcatttattgtcaaaaacaaattgtcagttttagacaatttgtgttttctatcagaacacctagcacaatgacatgtttacaatttgggaatttgtggggttttttagcatcatatgtcaaaaaatcaataggattttagcaattcaaaactgtattcatctcacaagctttgtcagatggcttaaaaaagattttaaactgtatgtatgttctagtcataatagcccatactggacactacccaaatatctacctccagtagaataaaaaaataaattgtggtatttccatgccatgaaatattttaccaaactgtgaataaataacctgggactttatgcaacagtcagactgaatgttgagaagaagaaacctgacacaaaaccatacatactatgtgatttcatttacataaaattcaaaaataagccaaataaatttatggtgttcaaagttaagacaggggcttccctttttggggaaggaggaggagtagctgaaagagatcaggaggagacagagacttttcctaatgttctgtttcttgatccaggcgctgattacacaggtatattcagtttataaaattcatcaaactgctcacctatgatttgtgcacttttccatagatatgttattatacttcaaaaaaagtcagagaactagggtaactatgataaaaaatgaaatgaaaacaatcaataggaaaacatatacaattcacaaagcaactttgaggtttctaacattttggctccatattgctgttttgaaaacttgaggcaaagaatgttataggaaactactttgttaacatgtttgctttagaaaactgtttgtcctaggaagttgttcttgacccatctgctttgatgagaaataattcattatgacatcactaactcagtgctaattaactcgacatttataaaatgtgtgcagcagattttcttaagaccaagaacagagctgaagttgtttcttcttgattcaagaaaaaattatatttttaggtataaaaggacagattaactttagaaaaacgatactcattttaatgcttccctttgataaaccaaaacctatctgagatgtccttttttaataaacattggaccatctcctgttcagcctttcccccaacagttctaagcccaatccaaccttcagttataaatggagacttatatgtccagagtgttgccaattcatgccaagttccctctcagacaaagttatgtctttaagtctgagctcttagaaggatgggaatgaataaatgtattatctatgcacatatgcagataacaaatgcatagaaatttgcataagcctatttagagagacgcactcaactttttcctgtcaacaaaggactttcacatagacacatagacaagcactcttgtttttttctttgagacggagtctcgctctgtcgccagactagagtgcagagatcttggctcactgcaacctccgcctcccacgttcaagcgattctcctgtctcaccctcccaagtagctgggactacaggcgagtgccaccacgcccagctaacttttgtatttttagaagagatggggtttcaccatgttggccagggtggtcttgatctcttgaccttgcgatcggcccgcctcagactcccaaagtgctgggattacaggcgtgagccaccatgtccagctgacaagcactttaaaaagaacattttctcaaaattttcattttcctgtcactttttcaaaaccatcttctaacctcctatgtcttggaaaggtggttcctcatatttgaatattaactttttttctctattaacactaatcctttttaggaaaaattagtaggctcttggaagaataaattgaattgaaaataaatttcaaggtttgattttaagtgttaaccactcctaaggctgcttaactcagaaatcaccatcaacctcctcttggttaaacgtcttctcaggagggcacaatagatgctgcctgagctctgagagagccacagtgggtctgcatttagctcttctactcattcacagtgagacgtgtctacttggatgacctggagtactcgttaaaacacagattcccagggccctctctcagagattctgaaaaggcaggtctgggctgggggaccagatttgtatttttaacaccccaagagactgatgcaggaccacattggctgacatattgaaatgtatgctagatgcatgctatgtataaccccgtggattctgcactaatccagcaagaaggatcagatgccctcagaggcctggccacttcctccatcccccaattcacttcacttccccacatccagtctaagcactgatcccaggttgagaaaggattgtattccaaataatactttgtaaagcttaattggaactaagaactcatgtggcttttttgttctttctttttgaatggtgctttgggttcttaggcctccttatttaacctagaagggagcacaacctcagcaccaactatgggatgccgggctctgggagtagaaggatagaaaagtaagaagtcattgccagtttgtttcccagacaggaatgatcttaggcaaaatgtgggggaagagcaggaaggagaagtttgcttgacaaccacactcctccttttctgcatttttctccctcttagagttctttttcagagggtattggggttttctaaactttcattcagcttctcctgggtctacccctagtaatcaagtttcttttacctagagaagctaatatcagctaagatttaaaagagaggcaatttgattgaatcagttcatgccaaagtgtgagtggctgaaacacaaccagttaagcaatatttaatagcacaggtgaaagtgtctctgtgatcgcattccacttctccagtttctcccggaagaaggagccttccaggccctcaaccatgtacctgaaagatgtcctactcatcatctaaaagttggtcaacccacttagaagccacacccatcccttgccacagacttactgacatgcccccactcagaaccagaacaagccatggtctcacaggaactcttgctagcactggtaaaattatacaactccaacataacttcgtctactgttacttcttcacttaaaacctgtgaaaccttgacctggcttatccataaaaacaccacaatttcttccacattttttctatttttcttccttgcccatattcattttattttattttatttttgagacagaatctcgctctgtcacccaggctgaagtgcagtggagtggtctcagctcactgcaacctccgcctcctgggttcaagcgattctcctgtctcagcctccctagtagctgggattacaagcgcacgccaccatacccagctaatttttgtatttttagtagagacagagtttcaccatgttggccaggctggtctcgaactcctgacctcaggtgattcacctgcctcggcctcccagagtgctgggattacaggcgtgagccaccacacccagtcccatattcctaagtatattgcaggctgtcccctttccaaaagtcaatatcaattatattagaaaacagcaaagacatttccagctgccaatccaaaagtaataattagcctgactgccatgtagttgaccctatagacagactggcctgtgaacgactcaatgggatgtcttgtccccacaaatctgggcataggtctctctgtcctctttgcgttgggaccatccttttctgcagtgtcttttttgaaatgcatggtactgttaaaagccgcacacaggacagacacatgggaagctatgttggagcaaattttgcaccattttagaagtaggggaaagaggcattatataccttctagactaatcccagcatccatgacagagatccaagacttgtgggtctagccacatgcttctctccatgcattcacccatttcattcaatcaacagctggtgagcgatgcctcccagggacacacatctatgaccagcattagttgggggcaggtggttagacaaggatggaccagagataagtatcaacctataagtataagaccttataggttgggaggggaggcatggcatgccctcaaaccataattatttagggtaaaaagtggtaaatgtgatcaaagaggtgcaaaaataatatgagacctcagagaaagaagagtgggctccccatcaggagagtcagagacaaaatctgagcgagtcttaaaggcttgtgattgatttatacaagaagttaggcagcggaagagtggctcaggtagcagggactaaaggtacaaagagcagagggagaaggtgccttctttctagcactggggacaggagataagagaacccagaatccccaggtgagttgcttggggccaccccccatgaagggctggaagctggtcggtggggaaggctaagattacaggtgggttgggaaagctccgaaggactctgagcaaagcgaaaaggcgggtcctatggaatgcgccccattttcccggctccttggggactcccaggcattccttctaacaagagacatgttgcctgccagccagcagatgtggcccatgaataaacatccctgcagggctgggggctgtgggggggataataaatatgaagaaagtggtggcctgcccctccatgtccccctcccttgctcccagggcagcagacacgctctcccaaaggggcggacacagacgtcctcacaccgcggcccgaccggccgcacattaatccgggtggatttggccatcttgtgacatagccaatcagttcgagggaggggacggcaggaacgcctctcctttcacgccacaaaaggattttcgtcccttgagagcacaatgaaaaaaaaaaaaaaaaaaagccaatcaaggcgggatcagctgtgggctggtcgctgcagatctgtctctcccagaggggggtgggggcacatattggtccgtgtgggaaacccagagcctcagcttctcacacattgttctcctcctcttcaactgcaccccctccccaccagcccggaccctcccctctcccctccccaaagccgttattgccacaaaagatactttccccattgtgccccggacagctgagaggtccgagttagccatacacagctccgcgtcctctccagggagaaaggggatggaccctgcaagtggagagcgggatgcttatcatacaaaggaattaaacccacttgggctctctcgccatccaggactgtggggggttaaatacggttacattttcattaggtgctaatagcagaagggcagccccgggcagcacggaccagacattgttatgaagaacgtccccgacaagggaaggtcagggcaggtggggtgggaggtggggagagggacatgccagcgtcaaagccgggtccagggaaggggggcatgccatgggcgtattgttggcctgcgagttccgtcaatgggaaaagtcatgtttcctccgaaggaaacaagtggaaattgtcggggaggggaagggctggtgggtggctgggaagcagagctcggccagttgctactaaggctgccttcgaactgtccctccccactgccagtttctgcaaatgggcaagtctggtccttctggaaggcagttctggggaggggcagtggaagggaacgttttaatatcaggaagaaccgatgtaaatcctagcactaggactctcactgctcctgtagcttggggcatccgtgggactctaaccctcaatttctttttaatgcaaaatagagataaaacctacctgttggattcttctgagctgtcaatgaatgtaaatggtccaaagaggtgctcaaaaaggaaaaagtctttctcttctcactagccacctccactcccaactaccactaaaaagaaacttaaaaagtcaaaatgaaagaatccagcatttgatacagtgggctaacagcacggatgaatctttaaagctcatcacttcactcacgtacaatattccagcctcctctgcatgggaagcaaactcctcttgtcctgtctttagtttccatcaaagctcagcccagaacctgacatctggctctgctgaaatagtttcttgctgttatagattcaacactgctttgactccagacagtccagacactacagtcttccaacccagaaagcttgggcatatctaaatcaacaaggaaacccatatcttctgttttgttttgtaatccatgcttttattagcacattgttataaaagcataaccataggtaagacactgtacgggacatcctgaggatgcaccatgaggatgcagacaggtgcacatgggaagacaagacacctacagcacgtgaccatgaacccaaggcaggagaaggcttgtctgagcctttgctgttgtaggtacatggctctttccttcatcagataatgagaattggttctccatcatttctcattgcactagggattcccggaaactcagaattcaactgggacagcaaactaacaaacaggagaactgccaccaaaaaaaaaaaaaaaaaaaaggtggatcaataactgacaaataaaagatactaataattctttctatatagtaaatgacaagaaagtgcaagcattgacagaacaattcagcagatgcagaatttgtttttccattgacatttctgtatccagtggggtcaaggtgacaactgtgtcttctccctacatagttatgtcactgctggctactctagctggctctctaatacagacctctgcacatagcggtcctaaatccacagggaggggaagcagttgcctctgatgatgtttcaggctccacaatgctgcttttcaaccagaaagccagtgccaggtagggctgatggtctttaggagttccataataaaatacttcgtgaaaatgaaaatggcttgatcaacgatggcgtctatgggaggtctagaaaaatgacttgtcttctggaacctctgcccagtttcagaatctctgcatccactgctgaaaagaaaaaacaattccattgtgatgtatgtgtcgatggagataaggtgggaagtcatttccttaaactggctgagaaggccttgctgggtgctagcagcaaatttgtctagccatagcaggggttcccttctctagtcatttctacttcatagatagtagagttttagatttgtaagtcacctgagaagtaatttactcatctagattgtccctggaatgagaaaaaaattagaaatatttttcagtgcaaatttataattgggagtctgatatctaaagtctttaacaaactctctgttatctttatcaaatctcatatgtgattctttttttgagacagaatctcgctctgtcacccaggctagagtgcagtggtgcaatcacggctcactgcaagctctgcctcccaggttcacgccattctccttcctcagcctcccgagtagctgggactacaggtgcccgccaccacgactggctaatttttttgtatttttagtagagacagggtttcactgtgttggccaggatggtctcgatctcctgaccttgtaatccacccgccccagcctcccaaagtgctggggaatataggcatgagccaccgtgcctggcctcatatgtgattcttgatctcttacggagaacaccaggttccaaaccaaagaactcagaggaaactaagtacaatgagaaggtttctaacttcaaccaactatttttttccctttgagaagtagtgaaaatgcctcacccaactggttaataaaattagaattcaaatctttccaggtgcaatgataactccctttagaggaaactgcttccctgaagccagcagtgcccagaaattacaaccggtttcagcaattaacagaagtaaaacattaaaaagcatgaggcaaagtacatttgcatgctaatagccccttctgtagtgctgggaagctgtgttttacaacaaagcagataactttcccactatagcaatattaacccttgggttctcactccagctccttgcccctgattctaatgtctggaatttgtctggccatggttggggaagacatgggttaactccacatatcaatccatccactgtggcctaattctccctcgcttgggtaggggaagaaagagaaagagacttaaaagttttgaatgtctttagggatagcaagaggaaagtggaaagactcaccagggggtgaaaaagaaagcttccctagaaaatacactggaatgggcagggcagtgcttgagcacaagctctggtgtcaaatgagacttgaatttgaaactggcagtgatatttcctagtgctgtgaccttgggcaggttacttaagttcttggggccccagtttgcttatctaataaggtggaatgtaggttaaatgaggcaatgagggtaagacttctatatgcctggaaaccctaatggttactgtaatggttgttagagcaggtggtatttgtggagttccaggaggaactttttgaagaacccttgagtacaagactatgacaaagccctatggcttcactggagatgcaaagcaattgtttttgcctcctgcagaaagttaaccttggaatacgagcagaatatatatatatatatatatagatagatagatcccttttatgcttcctcaaggtggaggccaccaacattttggattccattgaagatgacagtccttgaggatatacagagatcaggagaaaattttccatctctataggaagaaggcaggatagcacagagcttaggctttggagctgggtaaacctggttttgagatccacttcctttgacactacccaactgtgttaccttggataaatttcttaacctctctgtgcctcagtttcccattgtaaaataaaatgtcatacatctggggcaagagtaccatgagtaagcactcaacacatgtcaattactaagggatattcctttctttaaaacttcatttccccttgtcttttcccatgacacaatgaggaagcagtgcccaaagtatgtcatggcttagatttcaagccaactcactgaaattaagtaaagatgaggaaagaaaagtttcggtttgtacacccatatcctcagagctcaccacagctctgacgacggcaaagagaggttgccggaaggaaacaaaagtccatcaagggctggcaaaatattaatccggagctcacggatgggcagtgatgcgcaccctctgatggcgagcattcccttcatgttcatgctgcccgtgggctgacaaaagcccaccaccccattcttgcattgtgggcactcaccctgacttgccgttcatcctgtcctgggtctacttcctagcgactttccaaggcaggtgtagggaggggatagagagacagagagtggactggaagatccaggggaagaaaaggcagttctccagctctccctctaacaaggtgcacttctgccctagattgatggttcttaaccctaattgtgcattagaaacacataggaagctttaaaaaataatacactgggtactcctcccattgattatgatccagttttttctgaggtgagccttgtacatggatatttgtatagatttttatctagcgctgcagtgatctgatgtgttgcctgccttgagaaccattttccgctaaccttccagaacgtgtttgttctgtagcagtgctgctcagtctgggattcatgttaggattcattggaggacttatttaaaaataaggatgccgactgggcatggtggctcatgcctgtaatcccaacactttgggaggcctaggcgggtggatcacctgaggtcaggagtttgagattagcctggccaacatggtgaaatcccgtctctactaaaaatacaaaaagtagccgagtgtggtggtgggcacctgaaattccagctacttgggagactgaggcaggagaattgtttgaacccgggaaatggaagttgcagtgagctgagatcgcaccactacactccagcctgggcaacggagtgagacttcatctaaaagtaaataaataaataaaataaggctgcctaggacccaccctaagaatttctgatttaattcacttgaagtggagtgcagacatcaaagtcagacctcctcaagcttttaactccagacatgtaagattgtccactacagaataatttgtaatagcaaagactggaggcaaccctcataggagcctggctaagtaaactcttaacttagaatactatgcatcagttaaaaagaatgagaaagatttctctgcgctaatattgaaaaatctcctgaatacataccaaaaaaagaaaaagaaaaaaaaaaaagcaagaggtagaacagtgtttatagggtactatggtttatgtagaaaaagggagaaaataaaaataatacaagtagtgacaacagggaacaaggagtgacggaatactttccaaatgggtaagattaagacttttcatagggccgggtgcagtggctcatgcctatgatcccagctcttagcgaggctgaggcaggtagatcgcttgagctcaggagtttgagacccacctgggcaacatggcaaaaacctgcctctacagaaagaccaaaaaaaaaaataaatcagccagtcatagtggcatgcatctgtagtcccagctactcgggaggttaaggtaggaggatcaactgaacccggatcaacggaagcttcagtgagttgtgatcatgcttctgcattccagcctgggtgacagagcaagatcctatctaaaaaaaaaaaacaaaaacaaaaaacaaacaaaaaaaacagaaaaaaactttcatgatgtctttattctcaaacatgtaaattacctattttaaaaataaagcttgtggccaggcgcgatggctcacgcctgtaatcccagcactttgggaggtcgaggcgggcggatcacgaggtcaggagatcgagactatcctggccaacgtggtgaaaccccgtctctactaaaaatccaaaaattagctgggtgtggtggtgcatgcctgtaatcccagctactcgggaggctgaggcaggagtatcacttgaaccaggaagtccaagtttgcagtgagccaagatcatgccactgcactgcagcctggcaacagagcgagactccgtctaaaataaaataaaataaaataaaataaaataaaataaaataaagcttgtaaaatgagcagccaggtttgaaaacattgatctcgggtaaagtcagcaaactgtagccaggagccaaattcagcctattgcctgtatttttttttaattacaattttaattttagagcaatttcaggttttcaaaattatttagaatacagaatttttctgtataccccacaccctttttttctttattaacatcttgcattatggtggcacatttgtcacgatgaaggaacaaatattgatcaattattgttaactaaagaccatactttattcaaatctcctcaattatgccctaatatcctttttgcattccaggacctcaccctggacaccacactacatttagtcatagtaagtccttagcctcctcttggttgtgataacttctcagagtgactttctttgtttttgatgactttgacagttttgagggatactagtggggcgttttgttgaggattcctcaattgagatttgtttttggttttttggtttttttttttttcttgattagactgggataatgagctttggggaggaagaccacagatggaatgtgccactctcgtgatcatggtatctcccctgccaggtaagtatggaaagtgccactctcatcacatcaagagtccatgctgttggccaggtgtggtggctcacgcctgtaatcccatcactttgggaagccggggcaggtgaatcacctgaggtcaggaattcgaaaccagcctggccaacatggcaaaaccccgtctctactaaaaatacaaaaattagccgagtgtggtgttgcgcacctgtaatcccagctacttggagggctgaggcacaagaattgcttgaacctgggaggcagaagttgcagtgagctgagatcgtgccactgcactccagtctggtgacagagcaagagtctgtctcaaaaaaaaaaaaaaaaaaaaaaaaagtgcttgtctacatgtctatgtgaaagtcctttgttgacattaaaaaaaaaaacatccatgctatcaatgagatttattgatatcgatattaacctggctcaggtagggtttgctgggtttctcgcactttgtttctccctttccatactctagtttttggaagaaagtcactatgtgtagcccacacttaaggaggggggaattacgctccaccttctcaggggtggagtagctacatacattatttggaatccttctgcacagatgtgtctggtctcttccatttgtttacccagtcatttatctttatcattatgaatcatgggtatttactttatattttgggggttatatggaatattactttatttattttaattattttttttttttttgagatggagtctcgctctgtcgcccaggcttgagtgcagtggcatgatcttggctcactgcaagctctgcctcccaggttcacgccattctcctgcctcagcctcctgagtagctgggactacaggtgcccaccaccatgtctggctgattttttttgtattttaagtagagatggagtttcaccatgttagccagaatggtctcgatctcctgaacttgtgatcctcccgcctcggcctcccaaagtgctgggattacaggcatgagccaccgcacccagcatgtgggggttttatcgttttgcttttttaaatttcattttgttttggtgttggtttttgagcattttcttactttctgccactacgagaggctcctggctcgttttgcgcatttcctgctccagtagagtcagctatatgagccctggttctttctatagacaaatggttttaggaactaagaccaggcactaggtgttctcattgttactggagtgttagtgcttctagattcttccaactgacagagcaaggagacatatatacgtgtgctaacctgtatatatatgcagatcaatgaatatttctacatgtaattatctgtttctacattaagctaaatatggatttgtacttatgtctccaactcgaatccattagcacacagatcattcccatctcctccccttgcttatctgtgagctcccattctagcaatgaaaaacctggctcccacaatctttgatccattcactgaactgtccaattctggcctttatgcataatggtttcagaattgctaacccttatcttccccacaaaaaagtgtgtgtgggggtgggtagaaatgccaatacagtgcttgtatacagctcctttttttctagtattattataataataattattattatttttgatggagtctcgctctgtcacccaggctggagtgcagtggtgtgatcttgactcactgcaacttctgcctcccaggttcaagcgattctcctgcctcagcctcccgactagctgggattacaggtgtgcgccaccacgcctggctaatttttgtatttttgttacagacagggtttccccatgttggccaggctggtctcaaactcctgacctcaagtgatctgcccgccttggcctcccaaaatgctgggattacaggcatgagccaccgtgccaggcctacagctcctttttctttcagtcttacagacttcactcactttcaaagttacttaggtcagtaccttattccctgacctcattcattgatgttctttcatacatttgtaagacttctacatccttctgtcacatctgcattccaccctgggatccctcaaactcttaaataatatttttaaaacattgtagacattaaggtgcacttttctgctgtaaagttctatgggttctaatgaatgcctaatatcttatactcaccattacaatattatgcagaatcatttcactgccctaaagaagtccctgtgtttcacctattcatccttctctcttctctgaacccctggcaaccaacaatctctttaccaactctaggttctcttaactgacagagcaatgagacctatattttgccttttccagtgtgttatataattggaatcttaccccatgtagtttctcagacttacttctttcacttagcagtatacatttaagatcgatccatgtctttcaatggcttcatgcctcatttcttttattgctgaataatattctattgtataaatgtaccacagtttatttagtcatgtacctattgaaggatgtcttggttacttcctgcttttgacaattatgaataaaactgctattcagatgcagtttgtttttgagacagattttcactctgtcaccaaggctggatggagtgcagtggcacgatcctggctcactgaaatgtcagcttcctgggttcatgtgattctcatgcctcagcctcctgagtatctgggattacaggcatgtgccaccatgcccagctaaatttttttgtatttttagtagagacagggtttcatcatgttggccaggttggtcttgaactcctgacctcaagtgatccacccacctcagcctcccaaattgctggaattacaggcgtgagccaccatgttcagttcacatgcagaattttgagtggacatgtgtttcaaaccagttgggcaaatatctaggagtgtgattgcttgattgtagggcaagactagttttataagaaacggtcaaattgtattccaaagtggttgtaccattttgcattcccaccagcaatgaatgagagtccctgttgctctgtatccttgacaaaagctggtattgttagtttttgaattttagtcattttaacaggtatttcattgttttaatttgcaattccctaatgacaaatgatatttattatcttttcatatgctgtttgccatctatgtatcttctttggtgagagtctgttcataatttttacccatttttaaattgagttgtttgtagattgtgtattttggatacatgtcttttttggatatatgttttgtgaacattttctcccagtctgtggcttgtcttttcacttttatgtgattctattttgcatagcagaagttttccattttaataaagtctgacatcaattttttctttcatcaattgtgctattggtgttataagaacttgtcacagacccaaggttatgtagattttctgttactttttcttcaagaaatattatagtttttcattttatgtttaggctcatgtccatttttagttcatttttgtgtaaagtgtaagatttgtgtctagtttttttttccatatggatatcgaattgctccagtatcatatgttgaaaagattatcctttcgccgttgaattgcctttgctcctttgtcagtgatccactgactgtgtttgtgttggtctctttctgggctttctattctgttccattgatctatttgtctattctttcaccaatatcactctgtcttgattagtatagccttagtgtgagatatctggtagtgtgaatcttgcaatgttgttgttattcttcttcagtattatgttaccttggccctttcatataagccttagaatcagtttgtcattctctataaaatagctgcctgggattttgactgggattgtggtgagtgtacagaacaagttaggaagaaatgatatctaaacaatatcaagtcttccagtccatgaacatagaatatctctccacttattacatttttgtatttttaatcagaattttgtagttttcctggttttgtaaataaagttttattggttcacagtcatgctttttttttacatattatctgtggttgccttcatgctgtaacgtcagactcgactagttgcgacagaaaccatgttattcacaaagcctaaaacacttactatctatctgggcctttacagaaaaagcctgatgacccccaattgagagttcaaatcgcagagcatcttttctgtgatcctgttttctacgatctccttctcctcatggactttggaaaagaaaacatcctctaaaagaggaataagaacatctggagcctcagcaatgggttagaaactcttcttttgaggaagtgggtggggaatcaatagtaaccttccttattatccagatttctctggctgaatttagaagtaggctttttgtttgtttgtttgtttgtttgttttacattgtgtttatgttctaagctcagtactattggcctagaagtatctcaatgtccattatagcaaccggaacataggaggtttttaataaatatttgatagatgaaatatgaaataaattatggcgctgggcacgatggctcacacctgtaatcccagctacttgggaggctgaggcacgagaatcgcctgaatccaggaagaggaggttgcagtgagctgagattgtgctgctgtacttcagcctgggccacagggcaagactccgtctcaaaaaaagaataacaataataattatgtaagagagaagaaaaaacagttactctgaggtctgctaaagtgcaggagtaacatcctcaggagctatggaaacagaactagggacaactggcacagatgcatgggccatgtggctagcagcagatgtatgggaaggaaggtccttctcgtaaaaaaagctgtcagataacaccacgcactcgttttcacacttagcaaatgtagtcttgagtcgtgtctgcaccagtactaaagcgatatggaaataatattaaccaccatcatgttccaggcactgtgcgagtgtctttatagaatacaccaatccacacaacagctccaaggtagcctttagcgttcctgttttgtagttctgcaaactaccaaatcagatagcaaaatgacttccttaagatctccttgttttgaagtagcaacaccaatgctaactgtcctggggaagaagaatcttgctctacatcacaccttccagctgcatcaagcaccagcaaatagcacaagatgctgtatagctcctggctttcattcagtcagcatgtatagatgcccatctccagggatgtcaaaggagtatcatagacgttacaatactagaaaacatctttccatgtctgtgaatgtctatccctaaccctagtctgtcagtcaatcagttggtcagccaggggagtgacttcagttgaggacacagccctctgcagcaggtgttacagggacatcagcaaagggacagacctacttcctgcccacaggaaccttatgctctcctgggaactcacatacccctgccctacaaggaaagtcaatgaatccattaaaaactgcagtgagacaaatgatcatttctatacagatttatatacaccggcattggttgagtgtgattaaaaagctgtggagccttcaaacccttcaattattcatgcctttcatttatataacaaatcctcatcagtgtctgatttccactgttcaagtagccatttaaaaaaactaacatttttggagcacttaactaattatttgtagcatttttgtggtagatttatatagacctcacaatatatcaaccatgcaaggtacctaggacaggaattattattatacccatttcaaagatttgtatatcgaggctcagagaggtaaggtgatttgtccaaggtcacacaagctggcaagacaaggcctgtccaccagcctacagttcctttgctattgtcatgtccccaaagttcttgtgccctaatcctttctctctaaccatgtagaatagaaagagtaggttcctaagagtcagagaagaagactctggcatctcatgaccacttggctagactccttccccagaggggaaacttgctctgagcaagtttcaaagaatgtcctcattcaacttctgaccccagtagtggcacagcccacatgtgaaccagagaaaagtggtaatcaataatggtgaccttgttttttcaagcttttgttgaaggtcacaggtgttcacaaactcttccctctcttcacccactaatgtcttagatcctttctgaagggcaggctgaagggcagaaaggttaaatggattaactattccatgcatgggcagagattatgacccaagtccccatgatactaaggctgatctccaatcacccatccaatgctgttcaccttggaaaagatctggcatggtttactaatgatgggccaggtgccacaagcattccaatgcatgctttaaaatgcattctcagcagtgggaatggacttgcctacatccttcaaactcattccagacaggagattattttatcttgttcactctggtgtcctgacaccaagcacagtgcttggcccatagcaggtgaccaatacatctttattgaatgactgaagctatctacaccacctctgtccttgagctaagtccatgacacagaggccaagcaagatcaatccattttcatggcattgaacttacaatcctggatggactctttctcatgctacacggacttacacaaacatggttataacatacaaccagaatggaggaggggcaccgtgaggattgaaggaggcaaggtaagcaggtgctgagctctgagcttcacactatctggactggagagaccagttcactgataaattaaagatgctcaaatgtagaagatccttggcaggaaggaagggtcttgagccattttgaagcaggcaattcattttgtgattcaagattccagattggtggttctaaagattaacttgtagaaaactcagaagtactagatagaataaatgcctgccttagggggaagtattattattattgctttatttttccctgggaggaagaattactactactcgatgacttctactactactaccattactattactatttccttctctgaccccttttttccctttggcttaaacgtcttactagaattactcaggagatcataaagagagagctaccagcactctcttccccaacccccaccaaatttgttttaaaaatatgtatgaagctatagagagaggcagatctcagaagattgggcagagctaccgcagctgcaaagttataagcccataaataaagtttatggttaaactggcctgacctggctttgcccctaggtacagaagcagtatcttgtcattagtatgcagaatacatcagcctgaagtctgctcatttgttctcaagccacttggctctataaatcttttggaaagggtggggcggggagttggggagccaaagtgaggggcagacagaaaaagagcaggggagggaggagatgagccagggctgctaagaggagtttctctactgcaacccaacaggcggccactggctcatgtcacttggtggagggaaaatcacaggtcccataaaataaactattttgcttctccagccatagataaaaatgtgagagactatgggaaacaaaatctaagctgtaagacttgaactttgtttaccccttctagttcaaaaaacaagttcaaagttacttgtcccaggattttacttaagaaggaaaagcctcccgcttttttgttgcttatttttgcctctgtcttgttttgatggtttgttcttcagtccaaagaaaggactggattttgctctcccacaccacacagagggctcttggaaaagctgatggggtcgttttcaatacctccatcctcagcagaccactgagtgggggggatgctcagctcgctgccatctccgctgaggagtacataggagaaaacacaaggacgaaggggcatgcaggaaagctgagcttgcaaacctccctgaactctagggtatggagagctgatgtagtttgctgaagatgaacatttatttctcctttgttggggtaaccttcagtctatttctcctgctgtaggaacccaggaatgaatactgattctgccagtctcttttctggagaccctggctgccagtggaagaaaggacatgggggaagaggtgggtcttgatagttgttgcctcttcagtgctttcacatttcccattggacagcaagcaaagaggcatgttttcttcagtctccaccagggcagaaaggacacatctgggcgccttggaaagctgttgccacgatcatcgcagagccttgccagggaaggctggtggcagggaagggcaggaagatgcaaaagagggcctaagcaccactcggagaccgcccatcccccaacattgttgtctgcatgaaagatggttaaaattaacctcaggggcagccttcaaggggaaattggagggaaggtcttacagggcctcagggctgtgggtggaggagggggctagactgcagtttccaagctgtctgtgccaattcctgatgacttggggtttttttttgttttttgttttttgtttttgttagacagagttttgctcttgccggggctgaagtgcagtggcgccatctcagctcaacctctgcctcctaggttcaagtgattctcctgcctcagcctcccgagtagctgggactacggacatgcaccaccacacccgcctaattttgtatttttaatagagatggggcttcactacgttggtcaggctggtctcgaactcccgacctcaggtgatccacctgccttggcctcccaaactgctgggattacaggcataagctaccttgcccggcggacttgggagaactttcaggtggtgggtttgtagttgagcctcaggccctttattttaaatatgcattttcttcctttactccagggattcccacctgcagcattatttatatttgaggctaggtaatttgtgtgtgtgcatgcaaaaatgtctctagacattgccacatgtccccgagggcaaaactgtccccagttgagaaccactgttctacaaatctcctgccttttgcctctccaattcagtggccaagagtcaagcatggccaagggcaagcagggcccaaggcaagtagcaagaaaggaaatacaaaaggaggccctcagcttccagagtttcaggaatttattcctccagagtgcttttaaactcatcattagaacaaagaacaaacacatacaagcaaaatgattcttcaggtcaggctgcacaatttagcaaaaaggaatactttttgttattttagtatgagcatgtcctacatagtatttggaatatacttttactaaagaaaaaaatggtcgtttattcgaaatttgaatgcacctgagcatcctatatcttatctgtcaacagtatcttcaggtagaggtaatcatacggggaaaaaatccagaaggagaacacatgtcctcattgggcagaaatatcccattttggccagatagggtggctgatgtctgtaatctgagcacttttgggaggccagggtgggaggattgcttgagcccaggagtttgagaccagttggggcaacattgggagactccatctccacacacacagacaaaaacatttttttaaagttagccaggcatgtcactgcactgaagcctggggaaggaaggaaggaagggagggagggaggcaggacgggacggaggcaggacgggagggagggaggcgggggggggggggcagggagggaggcaggcagggagggagggaggcaggcagggagggagggagggagggaggcaggcagggagggagggaggcaggcagggagggagggagggagggaggcaggcagggagggagggagggaggcaggcagggagggagggagggagggaggcaggcagggagggagggagggagggagggaggcaggcagggagggagggagggaggcaggcagggagggaggaagagagggagagcaacatgaaaaaaaagaaatatcctattttcttggagcaggattttacctgtaatcgaaaaaacgtaaaagaagacagccctcaccttcagaccactgaagcactctcagaattctggcggccccagatgaccagggaatgtgtgagtgatagtctagactcctcttggtctggaaaagcggcctctgctccccactggtggtcctatttgcacacccacattggagaatcttccctctgcgcttggctgcagaggaaatgtgaccctgggtggccgagtctctgccaagctttatctggaaggggagatgtgaccacttcataaatccacacggaacaagcatgttttctgctggagcaggagatcttcactggcctttttttctgtcatcaatcttgtttcctctttgaaggagagggcccattactcatgtcctgacagaatcaaaagagagaaggaggggccccggagaagaagagagacctaatgcggcaggtgcagcctctgagaatccggggcggagatggagagggggcacaggtgtgggaaggggagactgacacagccggctctctggaggagctcaccctgctggctcagctgagtttaagggggaagctgctcctggggagagggaataggaagcagaaggggattcatcaccagcacagacacacagctgcgtctgcagctccttcagaccgtcagaacctctggttcaggagcaggaacacaggtgtcagacccacgtctccatcttgccctggcttctgactctgggcacccactcccccatataggctcacattgttcgtttgttaagtgaagggcctgacccaaatgcttcctggattccctcatgttgtcaaatttgaccttggactgttctgctttgccttccatttccttcctgtggaacagggggatgcccaagcttgggctgttttgccatttacctcctttggtgaaattctgacactctgagaatccctaggaaactcctgagtcctgtgaatttctttgcagttgatgcaaagagatatgacgtctaacgggaggacacagcctctcagaggattagccaccaggaatcctagtggctgaggataagcagtcctcctttacagggtaacctcgagggaaccaggtaccttctaagactcagttatacccacctgcaaagcggggaaaataatgcctgcacagcttacctattgggacagcatttgagacagctgctatggaagcactttttttttttaacatagaacaaagctcgcatacattatacataattgtacacacgagtgcgatacatgcacatacaacacatacacacgcagggcgatgtgaacccagcagtccctggacttcgaaaatggaaatgaaataagagtgtgtctgggaagggaggaggccaggtcttggggaagaaactgccagtctgtcttccctccaggacaacagctgaatcccagagcctcatcagacaggccctccatgtctcagtaaaactaaactgacaagcatgacccctcctgcacagttcaccttattgaagctgtctggtaggtgagacatttattaacatggatggactgcctactgagagggccctgctgctgggctcagcagagcgaattccgtccccagatgcaataagtctccacttcaatgtggaatgtgatcatgtcctccttgctgaaggaaggtcgtgcttttgacgtgaggattgttgatccacagagtggaggagctccaagtgcagattccagcaccaggaggcatgtcgttccacaattctggactggtcacttcaaaactcagtttcctaatctagaaactggataaaaactgttcaaggaagaaataagaacagggagggagagcggtaaaataatcactgatatggtttggctgtattcccacccatatctcatctggaattcccacgtgttgtgggagggaccccgtaggagataactgaatcatgggggtggtttcccccatactgttctcgtggtagtgaataagtctcaggagatctgatggttttataaagggaaactcctttggcttggcattgattctcttgtctgccaccatgtgagatgtgcctttcacgattgtgaggcctccccagccacatggaactgtaagtccagtaaatctctttcctttgtaaattgcctagtctcaggtatgtctttatcagcagtgtgaaaacagactaatacaatcactgactgcatcatcccattagaatgctggatgggtcacaagccagttctctacactaggcacccggcacacatacctatatttaagataaaacattggggaaaaatcccagggccagcttaagccacaaggcatacatgttagctgtctattgctaatgtccaaatgaccccaaaccttaacagcttgaaataacaaacatttagcatctcatagtttctgtgggtcaggaatctgggtgcagtgtagtggggtcctctgcccctgtgaacctcacaggctgcagtcatctcaaggcacagctggggtggggtcagggtgggtgagcttccaaacccactcacatggctgttggatggagggcctcggatcctccctggctgttagcctgatgctccatcagttccctatcacatgggcctctccgctgcaactcacaaccctttaatcgactttccttcaaacaagggagggtgatggttaatttgatgtgtcaacttggctgggccatggtgctcagacatttggccaaagcattatgctgaatgtttctgtgaaggtgttttttgaatgagattaacatttaccttggcagactttgagtaaagcagatgacttgccacagtgtgggtgggcctcgcccaatcagtggaaggcctgcgtagaacaaagattgccctcctctgagaaagagggagtcctgacagcaaactgtgttcacgctgtaaccacaagtcctgcaggggtctccggcttgctggcctcccccatcagattttggactcaccagacctctataatcacatgtgccaattccttaaaataaatcaatctctctctctctccatttctgtctgtctctctttgttacctctgtctctgtatatctctgtgtctctctgcttctgtctctgtttgtctctctgtgtctctctgtgtgtgcatttctctgtttcattctgtctctccatgtctttctctgtctctgttcctgtctccgtgtgtctttccgtatctctctctgtctctgtctctttctgtctctttgcctctctgtctcaatccctctgtttctctttgtttctttctctatgtgtctctctctatggtctctctgtctctgtctgtccctctttctcttattactttctctatgtctctctgtctctgtctgtgtctctctgtgtctctttctgtttctgtttctctccctctctctctctatctcatacacgccccatattaatcctgtttctctgcgagccctgactgatacagtgagagggagagaggcacagcctttgtgtatcctgatcttggaagtgccaccccaccactttgccactttctatttgttaggagttgctggctccagcccacactcaaaaggtggggtttaccaaagtgggtggggaatcactggaagccagtgtcaggggaagaaccaaaattcttgtgaaacctgtcagttgcatgatcttggggcaagtgatttagccccatcagtcttgtgttctcatctcatctctgagggctttagtacctcctcctggcacgtgttgtcaagtaggaagaatgcatgaaatacaactcaataaatgtgtatgacaatgaggagttaagcacttgagatcttccactgttttgtagagctagctgcatccttgaagatgaatgtgtttggcctggtcacattggtgtgaggacacggaggctcaggaaggcagagcaacttgccgaaggttgattttctcatttattccccaactgccccctctgtcaactttcctagtcctcggaattctgcagcaactgaaatctccttccagcctaagcccatgacaacaatgctcacagaggcaaagtctgccttgtaaaaattattttttttcttttgagattgagtctgtctctgttgcccaggttggagtgcagtggcacgatttcggctcattgcgacctcagcctcctggattcaagcgattctcctgcctcagcctcctgagtaggtgggactacaggtgcccaccaccatgcctggctaatttttgtatttttactagagacagggtttcaccatgttggccaggctagtctcgaactcctgacctcaggtgatctgcctgcctaggcctcccaaagtgctgagattataggcatgagccattgcacccagtcgaaaattattttcttttaatgttttttttttgttttccgagcacctattgtttgccaagtcatctacctggtattggcgtggtctatctaaaaaggtgacatttccactaaaacctgaagggtaaaaagtaggagttaggggaagaaagtccatgcttaagaaagcttgggccacccccagtccagggggagcaagcgtctccccacggtccacagaaatggtcttaataaagctagaagtgacttcatggttgccaaacccaagggcaccactgcatttgactgctctgtatctgtttcacccgaagtgccctcagacttgacatcctctgcctctttgttctccatgacactcatctgtgctggctctgctcctacatcttcgaacctcctccttagactcactcacagcctgctttgcctacatgatgtcctctgaatgtctgtctcatctgctcacttaacaaagcctcatggtcaaatcttgtgatgatgaagcccagccctatgtctccaggactcaggtcccctctgtcctcagacttggatatccgcctaactggctgttatcatgtcttctgggtaccgtgaaagcccctcaaactcagcagccaaaatgcaccacaatttctactttctagggcccacatatggacccttctcttttatatccagagccagtgacacttgggccaccatgtcagaaacctggaagtcagctaattctcctccttcttccatagttgatcaatcaataagccctattgatattgcttcctgaatgtgccttgaattggtccttttttccccatccctgctgctatttcaggcccttgtcatttcatgcctggactttgcaatagccttttttttttttttttgagataggatctcactctgtcgtccaggctggagtgcagtggtgcaatcatagctcactgcagcccaacctcccaggctcaagtgatcctactacctcactctcctgagtagctgggactgtaggtgtatgccgtcatacctggctattttttctttttttgttagagacagggtctccctatgtttgagaccaggctgatctcaaactcctggcctcaagtgatcctcccacctcagcctcccaaagtgttgggatcataggcataagccaccatgcattgccccaatagacttctaatggtcccagcttctccacctcctactcctctttcaaagtcatcttccatactacaacaagaacgtggtatttaaagtacacctctgaccatttcaatcctcagtgcaaaacccatccaataaacctcaagcttcttaataaaagatgcaggaccccttcatgaccaaaccctgcttactattcgtgtccttcatagcccgcttcttctacctttcccttgatattccaagataaactgcttgttgttctctcaacacattgtcctgtttctcattttatacaagttgtttcgttgctgaaatattattgttctctatacccactccatcttccactcttccttctttttttcatctagattacttctattcattctttaagacccaacagatagggccgggtgtgtggtggctcacgcctgtaatcccagcactttgggaggccaaggcaggtggatcccgaggtcaggagatcaagaccatcctgactaacatggtgaaaccctgtctctactaaaaatacaaaaaaaaaaaaaaatcagccgggcatggtgtcacgtgcctgtaatcccagctactcaggaggctgaagcaggagaatcacttgaatccgggagacggaggttgcagtaagccaagatcgcatcactgcactccagcctgggggacagagcaagactctgtctccaaaaaaaaaaaaaaagaaaacccaacagatattaccacttccaaaatgccctccaggattgcctttatattgtatttactatgttttattaaaatcatctgtttaaatgtcagtctccccactagactgtaagctcgtcaatatcaggcaccatatgtatgtctcagagcctaccacatggctggaacaaaataatgttccataactacttgttcaactgaattctcaaaattttccttccatgttactttagctctacatcaagaacaacaaaaactgaggattttgagagtgatgttttggccttgaaaacaatctctgtgcaaagcaccaagtgacatctaaagtctgtgccagtagggacaccaagagttggcttgaggagacatcatgggcctccccaccctgagcatttaatgtctgtgtgcaattgacaatcaaaggcctaaaaacatttttacattatttttgccatcatatttctgtatctgtttcatctgaggctttttctttttttctttttcttctccttggctagatcaaaagcttccagaggtcaaaaatagtgccttacgtttctcttctagccatctaagcatcaaccacaagtaattcagtaagtgtccattataaacaaatacaccatatggccaatagtgttcagcactgttgacagctataaagcagaccaggggatatagtagtgatggggcgaggtgaggggttagggctgccatctacatgtggtggcttctctgatatggtggcatgggagcagagacctgcaggaagtgtcagagtaggtgagtcatgaatatatatgtaaagttgctgcgttaaagaaaagatggcccaaacgctttgaatactcctcctgttgagaagtggtgtctatgtcccctgaccttgaatctgggagagctatgtaactgttttgattaatagagtatggtggaattaatgttttgtcagtctctgggcccaggcattaagagaatagcatcttccacttcttttctatcggatgcttgctcttggtacccagctgccatgttgtaaggaagctcaagcagcccttggaagaggcctatgtgaagagaaactgaagatgcagatcaatgacccagctgagctcccagctgacagccagcaccaactttctgtgaagcctagttgagccaccccagctgatatcttgtggagcagagaccagccatctctgcccacttctgcaaagttttctgattcatgaacaaaataaatgcttgttgctattttaagatactaagtgatgagatgatttgtaatacagcaatagatagctgcgatggaagcttctctgatagaagactgtaaaggcaaagaccttaactcaggataatgtttgaaatgttctagagacggtaaggaggctagtgtgatcgaccagagaatataagcagcagagcagtaggaggtgaggtcaaagaggtcactagtggcaaggtcttgaaggacactgcaagacatgacaaggacatccgttttattatgagtcatatggaaagcactggggagcgttgcataaaagagtaatatgatctggctcatattttaacattcacagcacatgaagctgaattattcttcagtggctgaattattcaatggctacctattaaataaatacttaagttcatggttcttgatcctggctgcacattggaatcaaaggggacttaactaagaaaaggaaataataattcttgggatccacctcagaacaattgaatccagtctttgggaatgggccaaggcattgatttaaaacaaaaacaaaagcaaaacaatcaaaaccaaaaacaaacaaacaaaaaaaaacaaaaaccacaactttcccaatgattaagtgtgtagtcagagttgagatccattgtctagagcaggggttggcaaactacagcccatgggctaaatggcccatcatccaattttataaagcctcattgaaacagaactacactcactcacttacattttgtctaaggcaactttcctgatgcaatgccagagctgagtagttgcaacaaccacataatctgcaaagcctaaaacattaactatctggctctttccagaaaacgtacgcctgcctggcctacagcagtagttcttaaatcaccagggaactttgtaaaaatgcaaaagcccaggccctctcctacttccatgagcctgggcctctgagtctttattagctccctggggtgagtctgctacacaccaaagttggagaacccctgtcctgactgatgaggaagaccagagaaacaccaaccaaggctgagtgtgagtgaaaactgagctgtgcttctgtctggatgtccttttgtctctcattatgtcagcctttcccctcagggagctgcagattcaaacaggcttctctgcccaaactgacaaattgagatgtcacaagaaccatttcagctggtcttgaaagcaggggaaatcacagcctctgcatgttcgtaggcagcatacctggctgcagtcaggccctgcatgatgtacacaacatgcaaaagctggttatgttcttgggcagtatctatgaggtccataccttagtccccacagctgcctctcatgtggtgtcttgctcatgggaacagcccctaacacgtaattgctttagtatagtcgcacttggccatgaccatgcatcattagaacctgtatggagcctaaaataaataaacaataatctgatgcttggtctacactcctggggattctaatttagtaggtctgaggtgggatctagttagatggccgttatgcacagccaccttagctgggattattgtaggctctagaacctcaagcagtgacttccaaacttgaacatgcatcagaaaccctggagggctcattaaaaacacagattgctgggtcccaccctagagtttctgggagttctgtgtggaacccaagcaaatgcctttccagcaagttcccaggtgatactgaggctgctgctctggggagaagatactgagaaccactatttttgtgcatagggaggtgctaccatgaaaggtacttcaacaggctaagaagcttgggcttggttcagggtatttggatcctattgttaaaccattggcaagtccatgcagatctcagttttgttgtggatagttaccaagtccataggctgatagtcagataatttctcctggaaggtactgcggaaggacaaaggatgatgaataaagaatgaataaaacaaagcctgaggaaacaaagcatttcaaaatggaaattattcaaagctcctttaaaacccaccaccagtgagaacctgaaagcataattatataactcatgaatataattaggtgcttcccttccctctccacccacttctcctaaggctttgggtctgagagaagtaggagggggtcctgagagtctcagaactcacaacataatatcctgtcttcttctgttcttataaacttcctcaaaaaatagtacttggatctggctggagccaaaccccagagctccctgtccatcaattaatatttatggggccttcacaatgagctaagcaggcatataaaagacaacagtacctgcagactgtcattaagccaaagaagaacaagcacctggccttccttctcacaaggtgttggcagctggatggttgtgtctgggtcaaaatgaacattcagccactcagcccagaaacatctcttggacgctcactctgttgcagacactcccctaagcactggagagatggcaatgaacaaaacagacaccctgccccaacagaagtgagaggtgagaggttctaaacagcttgtggacaaggtctggtggtagatatctacactagtggagccccagtctggtgaccgggtcagccagtctgttcaaaggctgtctgttcatttcatttgtcccttcccataaactactactgggaattagacatctgacatgtgaaggcctgtgactgatggggtccaagtttagaaacgttaaatgcattgcctccaaggatgactcagatgctggttggatttccatgtatcttgcctaaataagattttcactctgaagctgtttggagccaaagcatccaaaactctccagagcatcttctctccccagcagccctgctcgccggaacttatgtgccagttcagaggctaccttgacccttgctggaatcttggagttctccaagatgttctccaagttctcaaaggtggctccttaactcctccaaaaaggaaatgtggttttccagtgtattgcgtgccctttttgaaaggtggcttagatactagggaacccagatccccagatctgagcatgactgttggccacaacagaagtgtccctgatcaggaccctgcaactgtaaggtgcatggaggcaggtgccatttttcttgtgcatcgtggcaaccccagcacatagcacaggacctggagctcaatgggctggtgaaggaatgaatcagaaacactttatggaatttgaagtcccatggaactctggccaagaaatctcaccacctcaagctcctcatgttaacctcaccaaggacacaatgcactcccattggagcatggaggtcagacatgaggtggaggtggtaggagtgggaatctaaatgaagaccatggaacaggagaaccggccactggaagacctagatagctgccccatgagggaggaaggagagaaatgagttgtgggctagagaaaaaacactgagtccacatcccttcctcctccaaccccactcccaaacattagttaaatggggagaataggagtcaattctgaaagaaaagaatttaaaattattcccttccaagacaatggacctgggaaaaatggagattatgagtgctgagtcaagattgagccccatattggaggtaaggagcaggaaggcatgaaacataaaagaaatagaatactcagtttctgtgttcagtattgttgtggtatgatagaagaatgttttaagcatgcatagcatgttagcacaaacatgttagctttaatgcaattcattatatgcctataatatatgtaagcaaacctaatatacattctgcaggaaagcaagaatcagaaaacaaggtaagtttgactgggcgtggtagctcacgcctggaatcccagcactttgggaggccaaggtgggtggatcacttgaggtctagagtttgagaccaccctggccaacatggtgaaaacccatctctactaaaaatacaaaaattagccgggcattgtggtgcgtgcctgtaatcccagctactggggaggctaaggcaggagaatcacttgaaccagggaagcagaggttgcagtgagtggagatcgtgccactgtactctggtcttggtgacagagtgagactccttctcaaaaaaaagaagagaaaacaagacaagtttatgttttcactgtgtggaatatgctttgttcttctatacctcgagatatttgcatgtgcttttctctctccctgaaatgccaaaacttcttttcctggaaaactcctattcaactttcaaaacttaattttcgtttcatttcttacctccaaaaataactactttccctcatggattaccatagcacccttaccctctaccatcattgaaaatatgagttaacatagtggttgaacttgttacccattcttctacccttcttgactctgagttcctgaagaccacgttcctgccctcttcatccttatctcttcggggcctgtcatgaagtcttcaatacatgatttttggataaaaaaaattgttaaagggccattacatgatatgtcagattggaacatccagtggggatgggggtatgtctgtatggagaaaaccgagttgctgtacagagttgaaaattgctccctgagtcagagcttccaagcaatgggaaagggggaagaccatatgtcaacactggctaagagctaccccaacattcaggaggccctctcaggaagcatggaaggtcacaggcaattggagacttgttctttttttttttttttatcagataagcacttggtggagtattcaaagatcagcaggtcccagcttgaactttctaaagaagtcatggccatataccctagatttggtacaagaatgtgggcagggaaaccaggattcagtttgccccttgatgacagacccatcaaatccactggagctccagtcttggcaaggcctccaaaactctatggggataaactgccccctccatcccactgccgggtgtctgagagttgctatttgagaaaatggtaagcaaaatgaaataagtgtggtatttaccgctgttaattaacagcaaggtgttcatgagtaatgttgtggtattaagggtgtggagcagtttttcttattgactccctcctttgcagggttataaactccaggagagttgttccctcctggctgaaacttggcagctggcctggggttcttcttgtggctggtgtaggaccggcccactcatcagcctgttgagatctgcctccctttctaccatagtcactgctggggccctgagcttctggaaaatgtcttattataagctactcatgctgtgacactggcgtttgaagtccctaaaacaacgaattaaagagtgagccttacatgctctagaaacatccaagttcaaatgaaggcacccaaaaagccaacggaagattgtctatgaagcaaacaaggctgtctttgtacagcaggtgggtgcaaaagtgttaaaccaagagccactctgtaattctcctggatcagtagtcaacatttttagcaaagattcccagagggttgcttcagatgagaagatttatcagggagtgagttgcggggtggtgcatcttttattttggattaaatttataacacgctctggcttctcattccttgaataattgaaacatcccactatgttttacacttttcactttctatgttttttcacacaaaaaaaatcattttaatttttctccccatcaataactctctgaaggaggcaaggggggtattgttactccaattttgcagataaagaaatcgaggtttagagaattcagatgaccttcctagattcatatgacagtgcccagtctcagactccatcttctgacaccaagcccagtgctcagattttccaccctaatgtcttctataaaaaataagagtcagcatttttctcccacctggtcccacatcctgcaaagctgactggcaagcaggttgatggcaatgtgttgtgacttcccctcttggaaaggaagtgttctcagtgagtggtgattctcttctgcttaaatttagagaaacttggttcagattggcttggatttctgatggctagggatccaagatgaagggtcattctcaactctcttaatcagaattttgatcagaggaaaaaagaacacaagagaggagacaactctgaggatcatgactagaccattatctcccaatcagacaaaggcaacactagcacaacctcctcaaagacaataatatggtacaaggaaccaacaaattagtaacctggagattttaattagtgagttgagaactagacccaacaggaactcctccctagaaattcttcctgttccaaccacctggcaggaacattcattcctatctggaaatgttttcaagaaagctggcaataaccagctcaaccagtcccatcctctaagacgaagggaagtaactcttggaatagtgaccaaagcccagctgacgactgcggcaggtcccagagacccatggaaaagggaaaggacattggtcacagctgccttcgatgtctttgtaaatcttggcagaaccatgcagaaacaaaagaccaagaaagacaccccagtttcaaacatggagatcgaacggctactcataattatccacctgaacagaattgcactaagagtgcataaagagatattttatttcctttagagatgaacgcaatatgctttattttgccattgctttcccttcctacctaaggcaatttggctcacatttacgtattgtgtattcctcaatctcatattacctgtggaatggaaaagagaagtgatgagaaaagaacacagcctgaatatgaaggacacagcatggacatatcatgcatacatgatctgtatgggatatggtccttggttctgtctcagagccctagctcaccaatgaggggaagcaatcctggaattcatttttatgtctcctgcatccaggaaatctctcgaccactgctggtcttcaagttcctcctaacctgtctcccactcctcatcttccttatcaatggttgcctccaatatggatcccacactttttttctcagggaagccacccttcccctcactccctacttattttgtaccttgcaatcttagcatcctgctgggtgctaatgaagcatcttacccacatgtgtctgaaaactctggagaaagtgagtcctaagagtagggaagctggtgggagctcaagtttctgttaaaccctctttagtaggattatgcagctgatttgcttacaagtttcctaagaagcaagccttcttcaccaaggcaagcatcactgttattttcttagagatggcccatctagtcttacatgcacgttccttctgttcacatggtgtagaatttgtcccttttcaaaacaataaccctgggctgagtgtggtggtgtgtgcctataatcccagcactttgggagactgaggcaggaggactgcttgagcccaggagttcaagaccagccagggcaacatagtgagacctcatctctactaagagtttaaaaaaaaaattaactgggtgtcttggtgtgcacttgtggtctcagctacttgggagactgaggcaggaagatcacctgagccctggagatggaggctgcagtgagctctgattgtaccactgccctccagcctgggtgagagagtgagcctgtttcaaaaaaaaaaaagaccgaacaaacctggaatttttgttctaaaatgtatttgattcctttcagagacttccttgtataataacagtatagtatgaacagatgtaagttatccactggaggtgggtagtgacagttacaattagataatgctgatgacctaatctctccctagtttatcccactgcaaactgataattgagaggtggcttttcagagtctttatttctgtgaacaaagcttaccttgaacttctcatgatgacatgaaatagaagtaaaagtaacaactaaaagagccctggacgttcccctattgtgtgatatgttacattgctgcaaagtgacaacaagcaagacgtaagggttttatcagaaaaggctgggctggctactcacatcactcgatggaaaaattagtcttttctgcagaggatgaatgctcttctcagctgagctcacagacgtggaagagttgcgcatttaaccaaaagaagtggggggtggggaagttcacttagccagccagattattcaaataaaacctgtgatcagcgggcagctgatcattctcacatctttaaacaggtatgaataggttacacaaaatagaaccgcaaagtaatatcaccaaaagggaaacccatgagagtttaatacatccttggaagaacttcaccaacaaagcaatgcttgcagggcaaagaactatcccatcattcacatgatgtatttatcatttgaaagccttttcacatctctttttttttttttttttttttttttttttttttgagatggagtctcgctctttcacccaggctggagtgcagtgggtcaatcttagctcactgcaacctccacctcccgggttcaagtgattttccctgctttggcctcccaagtggctgtgactacaggcacccaccaccacacctggctaagttttgtatttttagtagagacggggtttcgccatgttggccaggctggtcttgaactcctgacctcatgtgatcggcccgccttggcctcccaaagtgctggggttacaggtgtgagccaccacacctagcccacatctcttacttttttttttaactttacaatctgtgagattcatggtgacagtattattatttatgtgattcgagtgataaagtgaacagcaagtgtgattctttcatggtcacataacctcattgaggatatgtccacaattataatccacatcactgaaacttgggtttgttttctcttcccagaacataaggttctatttagcttatgccattttggccacccctctccaagtaaaagaagcacctttcccaagctatactaagagaaataataacctggaagtgccttggcctcctgaccttaaggcacccttgtagatgttgacaagcatttgccaggataaatgaaaaggagagggtgcccatctccccctcttctcttttcatgtcctgtggttattattctgtgatgcaggtatttcagcccctgctgtaccaggcaacaggattagacaggttagtggagcatcagatttccgactgttaactttttcacttttcttctctgcacgtaggcttgagaactgacaccaagacaggaagagggaaagtgatagaggcaaaacggaagattaaaagctgatagacaactcagagagctagagggggagtcagaaagtatgaaggcagagacctcaagggatctgatgcagttaatcaaatagtatgaccttgtagctatgtcagtgtctgacctgggggaatctgaaggagggaggggaggagagatttagatagaaaccacacatgaggagagtaaaaggaaagtaagtcttattaaaggtgggagagtcagtactagctgttgaaacttatgcatcccatttcttggatgagaaatagatagcatttattgagctaatgaccatgtaattaagctccaatgagttaagcttaagctgtagcagggatagagcagaggaaatgtaccgagaaaggtgcttcaccaaaaacaaagttgattaaaaatgagatcaaatgatccaagagtgcattagaagagagaactcaatttattatccaaatgaaaggctgagattgactcctgatagccctcttaaacattaaattccacaattgccatgagtaggagatggccctcaagcagtcatgggtcctatggtaaggtcacgctaaaagctgaaaggacctgcggatggtcaagttcaatttcttcagtatcatgaggaagaagggcactgatatggtttggatttgtgtccccacccaaatctcatgtccagttgtaatccccattgttagaggagaggcctggtgagaggcaattggatcttgggggtgggtttcctcctagctgttctcattatagtgagttctcatgagatctgattgtttaaaagtgtgtagcacctccccctttgctctcttcctcctgctcttgccatgaaagacgtgccagcttccccttcaccttccaccatgattgtaagtttcctgaggccttcccagaagtaaaagcctgtgcagcctgaaaaaccatgaacgaattaaacctcttttgtttataaattacctagtctcaggtagctctttgtagcaatgcaagaatggactctcataggcaccaaatttggagtgatacactgggtttagttcctgaatctctctttcacttgcaatgtgacccttgggcaaaccatttaagctttctgatcccaatttctccattgcgtatgacacagatactgatgttcaatgtgagcatcatacctatggaatgtgagcaagattactcagtgccagaaggtactttgtaagcgttggcagtattcagttgagaatgctgagacccaagagatgaaatgatgctcaaatggttacttaaatagtcaagaccagaacatgggtctcatggctaatgtcccttcctagttgagaatacagtctcaggtgtaacattataaatgttactgtgtggtgatttgttgagacactcccatttgccctttggattgagcagtgaacaaaccccaactccattgccaactcattttcttcccacttatcctgagagcacagaagaacagtgcttgccccagaaatcattacggcagcttgccccagaaatcaatagggccgcttcccattgtcctttgggaaccctctattccactctaacagcaagcaggcagtaataggtagcacaaaaagccatagcccctaggctaccagggtcagaacagaaatctgcaggggtgcagacaaccactgtgagcctgaggagttggcaccatcttaagaagagtattagaccagtcacatgcacttagtctttcttcttaagctcctcagaagactgtctggtgtcacccagaagccagctaagccataaattcacccattgggtgagccctagcaacctgtctaatcctgctgggaaacagtacatccggcccttgacagcactctcatgactgcttgctgagaagcggtattttaaataaagagagaaaaaaaaaacaccctattgttttactctggtaattgatagcaagtttctcatgagtaattttatagcactcagggtgtgccggagtttgatttaacttctctttacaggagcttcaaacctgcagtacaaacatggttttgaatgggatgaaacatgcttcaaagatccatatagatattgacatttcctatttctatggcccacatattagaggcctttctctccacttcttctctaaatgtccccttcacatatttgagatcctgaaagatctcaacgaattttggttctagcatgtaggtatctatttaatacatgtattctggcaattttattttatttttattatactttaagttctggggtacatgtgcagaaagtgcagttttgttacataggtatacacgtgccatgctggtttgctgcacccatcaacccgtcacctacattaggtatttctcctaatgttatccctcccctagccccccaccccccaagaggccccagtgtgtgatgttcccctccccgtgtccatgtgttatcattgttcaactcccacttataagtgagaacatgcagtgtttggttttctgttcttgtgatagtttgctgagaatgatggtttccagctttatccatgtccctgcaaaggacacgaactcattctttttttatggctgcatagtattccacggtgtatatgtgccccattttctttatccagtctattatcgatggacatttgggttggttccaagtctttgctattgtgagtagtgccacaataaacatacatgtgcatgtgtctttatagcagaatgatttataatcctttgggtatatatccagtaatgggattgctgcgtcaaatggtatttctagttctatttccttgaggaaatgccacactgtcttccacaatggttgaactaatttactttatagcaaccacagtgggattcccaaagtgcaatctaaaaattggttcctcaaaatattatttttaaaaggatggggaggggcttctgcagaactagttttagcaaattcacaatatacattagtgtggtgaatgctctgagaagtcctgcagaagacagccaagctcatcactaatttgaacacaaaatttcccaaagtaagcagaagacagaatttttctatgggaaactgcatacacacaaacacattctaccactttttaattttgcgttttttttttttttttttttgagatggagtcttgctttgtcgcccaggctggagtgcagtggcacaatctcggctcactacaagctccgcctcccgggttcatgtcattctcctgcctcagcctcccgagtagctgggactacaggcgccgatcaccacgcccggctaattttttgtatttttagtagagatggggtttcaccatgtattcaggagggtctcgatctcctgagctcgtgatccacccgcctcggccttccaaagtgctgggattacaggcgtgagccaccgtgcccggcctaccactttttaatttaacagtgatatctgatcctacagagctaggatcttgaggaacatgtgttgagaaacactgcactataagagaaggaaggaagtccagtcagtgctcaggagtaaaccctattctactttactcttgcttttgtaccccaattattcaatcaacaaacatttattaagtattcaatatgaataatgggcaatggaagatgcaaagataaatcagatatgaagaaacatgataacagcattttcaaaaagaatgtgatggatgggcctttgaaagatctcgttcgaccacctctgctatttaaataagaaaacagggattgaggtaaattaggtggttggtctctgaacatagaacaccatacaactcttccagtttgaagtcccttaagtagaatgtaagcatggactccaataaacatttggcctaaagaagaaaaaatggttctatatataagtgccatgagccaaaggtatctgcaaatattcccaaagtaggggatttcaaatcccatgatttttagggaagggcagaaatgaggactgcatatttcggggaaagacatcaaagaggaaatttgatgagccagaggtcctgcattgaggaagacattgagttagatactcaaacctggtctctgggccaagaggaaacaggcctctggttgcagcattcaagtctacttggtaacttccactacttggtacggccatgggaatgccctggagttgacaagagacactgcccttgatctctcacagtggacactcagtgccttcacagattcacagctgagctcttcatggctttatttatttacttcattgcttttgatgagttgcttataccttaagtagggattattcgtttagtaatgggatttttcttctctccagccctgggagagcttcttcatcctcagagctttcagttatggcctatggactggtggttcccatatttataagtcaagttctaaacttttgttcgagcttcatccctcataccccagctgcctgttgggtggttttcattagtccctaaacattcctctgaaccttattatatccaggttgtcttctctcaaaccagcttcccctctcaatttccctatatcagtccatgaagccattttacatttttttcacctcctcattcccatactgttgggtactcagttttgaaagcatggaactttttccctctccttttcacttctcgtagcaataagtaactaagacatgccctttttctttgaaatgtttatctattcttttctttccctttctatttgctaccaatatagatgaaatagattttaccccttctggttgaatttacagtcgtctaactccaaggccctagtcattccctcttccaatccatccatatgatttctataccaggctgtgccacttcagttgttttgttgaaaacaaaacaacaaaacaaaacaaaaacagatgctctggacactgtatttcaataaattctctctgacatggtcagaaactatgacccatttgctgttagtggccactcaaagcaagtaagtctctgcaatcacagcatgttctgggttcatccacaatctcctcatcagccacagtagccccatctgtttcctgcctaccaagtgccagctatctgctcagtgcctgttacaacactatttttttgtttgtttttttccctggctgaagtgcagtggtgcaaacacagctcactgcagcctcaacctcctgggctcaagcaatactcctgcctccgcctcctgagtagctgggaccacaccgggctaatttctgtatttttataaagacaggttctcgctatgtgacccagggtagacttgaactcctgggctcaagcaattctcccacctcggcctcccaaaatgctggtattacaggtgtgagctattgcacccagccaatacaacactattaagtatctatcactatacgcttttcatggaaaagaaatcttccattgacatctaaaatccttatcaaaaagtgatttccagcttccccattaatatgaggtacaaataacattcaatgtgccttaaaatctgtttggatatatatcattgcctatatatatttgaacattaatggaaataatcatataatttggaaaagagagaagtgaaatgcatgtctcttttagacaaaattggaggtagcaagtagagaaaaacatgaaaagggctttaaaaaaaggtggtggcagggaggtaggcactgcctgtttaagacatgggcactacccattagtgtgttagaacctgttgttaatggaaaactcccaatcaataaagtggttttgcctaattttgcatttcggaaaaaagtattagagactcccctaagccaggctgtttcagcagggccctgtcaaactctgcactctctccacagggtagagttcttggacccctccccattttactccaacaaggctgtccaccttcccgttggccctgctgagccctgcaaatcactctaggtgcacctgcccccagcccaccagcccaagaaccacaaacccagctgaggggacgagtgggattactgcaaataaagtaaagataatcccaggcaagaaccttttatccaggaaaagactccatcaaatcatcctcacagctcctcaccatctcctcttaataacttgcatgccagaatgttacaaagattaaacctgttgaggaatgtgatgctttgtagccccagcatggagtgctttgagccaggggaggaggggcaggtggagggcggtgggtagcaaggaagaaaagaggagaagaaagcaagacaaaagagagtacactctgcaatcattctgctaaaagcctttgttcagccggcacattatttggtgatctagacgaggcataataaggcactttatctgcgcagtttattgtgtgtgtgtgtcataggtctacgtgtatattactgactgtaaaatatatataatatgtgccaagagagagaagagagagtgtaaacgatctgactcagtgagcatttgctttgtcggaggcaagctggtcttctgcaccaaaattgtgattctcatgttaaatcaagcagtgatatttgagaaaaggccatttcatgaagtccaaataattttaagataataataaatggctatactaattcctgtcttcaagagcctggacaaagagcagtaataagactctactggacatcaagcatagagtttattttctggaagttcaatgggtagcagagagatggggcaagacaacgcccagattagtattgaaatgtgacattactgcatgtttacttcctgcttgcagacctgctggagcaaacttgcttacttttatgttttctgaaacatgttctttgttaatgaaatattcacagagagtcttccacagtagaataaggtttgagttagacaaacttgagttcaacttttgtctctgcccctttgagtcatgtgaacctctctgactctcagtaaattcatttgtaaaatggaagagcaatacctactgtggaggttttgtgaaaagtggagataatgtatgtacccaacacactgcacatggtaggaccaacggtttatcatttacaagtatgcagttggagagtgattttgtccaagcctccaagataatcctttctacctactgcaaaatagatgggatggaaccatgccaaggggataagttgccgaaggggattagctctctctgattgcctttgggaagccatcttaaccccctgtagtacccatgaaagaaagaaaatgaattcttatcaatcaaattattacagagccccagagggtatattatatctcagtaatataattcctttaaaaggggatttgccaggtggcatcaaaattagttaatttatacctccgtaaggaaaacggggagaaaataggaagcatcctcaggatcattcattgcctctgatcattgttgtttgcagtatatagtgtagaggcctagatttatgtacgaccgagtctgtggtctctcactgaccatctgagtcacttcccggtcaccctaagttgaatctctacagccattcatttatctaagcattcatttattcactcatatagcaactgttttttgtttttgtttgtttgtttgaaggataccactggaggttatgatgcatacaaagaagtgagaggagggaatatctgcctggagcccacctgtattagtctgttctcacacgttaataaagacatacccaagacagggtaatttgtaaagaaaaaggtttaatggacttgcagttccacatggctggggaggcctcacagtcatggcagaaggtgccttcactttctgcaaaggcacatcttacatggaggcaggcaagagatcatgtgcaggggaactttcctttacaaaaccatcagatctcatgagacttattcactataatgagaacagtacaggaaaacccatctccatgattcaattgcctcccaccaggtccctcccatgacatgtggggattatgggagctacaattcaagatgagatttgggtggagacacagacaaaccatatcaccacccttaaaacaataatagacaattttgacaagtcttataaatcttatcctacatagtcattgttgccttcagccatgtggacatccacgaaaaatcatcaaatacaggagtagacagagggatgtgaaatgcaactttttcttaagcagtattggaggtactaagaggataaaaaaaaaaaaaaaaaaaggtcaaaaacaaaggaagcttcctgtttaatacatggtcattgccttcaagagatattttatttagttgagaaaacagggcatatgaacatgatcacttaaagtaacaattaagaaaagtcaaagtacttttctttcaacttttctggaggttcaaaaattttcttaaaaaaatcacaaaacgcatgtattaattttatcatcagtgtctcaaatagagtgtttattaataaaagagttcaaagcaaggaattgttctctcaaactggaacagagaggaagttctctgtgaaagaaaagaacttgggtcttttgaggtaatatattgattatcatgattattggtaagataagtaactttcctttctgaagtatatatgctattccacacattggggtatgtacttaatccaaactgccccatgtgatcctcataataactttgcaacatgagttttgttactccattttgcagagaagaaaactgaggctcaaagatgttttgtgagttcaaggtctcacagcaagttgtgggtggtaaagctgggatctgaacctggttctgtgtgactccaaggtcagtgttcattcaactctgtgataacgtctctctgacaagtttcttagagatttagatgagatatcaggcaagggaggcaagtatgcaccatagcacagtgataaaaatatccatagcctgtgaggaaaaatagttgactgtagcagtggttattggttgttcccaataccctttgtcaccttcttgctttagtaataaaaccctgaatctcagccagatacaaacatggccaaccacagttcaaaaaagaaaaaaaaaaaaagaaagaaagaaatttcccagcctcctttgcacctggatgtggtcatgtgactacattttggccaatgagatccaaatggaagccatatctacaatttccagaaaatgttcttaaagggaaggactgtgtccttcttcactcctgccccccttcttttggctgtactgtggatttgttaactggatctgaattggccaatcatgaaggtgatcttgggaatggaggtcacccaaagtagaccaacaggaaagcaggagcctgggtctctgagcccttggtggagcagaactggcattgctgtcctgggctgcctatacctggtttttaaaacaagagtgaaataagcttctgtgcaatttaagtcgctgttattttggattatactgttactggcaattgaacctaatcctaattaacacatagtttatgttgacttaagccaagagttttcataggtatcagtgggaaaaacaggttgggaagacatggaaatcatggagaacttctcaagtcaagttaaggcctgtgtcacctatttcgtaggctttctgagtagaccaatataatgcaagcggcatttccagaatacttaggctgtgtggtatagagtatcacagtctggaaagttgatgaaggagtgaaaacatttgaaaaactactccaataagccaggtgtgaggtgttcagggtctcacaaaggaagcaggactgggtggtcaagatttgaagctgtagcacttggatattaagtcaattgtgagggtgggaatacaaggtagtcaaaagtaattgagatttctccctgaagaggcatgggacattggcaaaagctaagaaagcaaaagatgaatggaatatcaaagagggacacagacttctattttagacttgtggagctagagatcatgccactacatctagagagatacagccaggatagatatgcatgcctgtagcttgttaaatgcaaagcttaaaaatacaagtttagacagtggtaagcatacaggagagggttgaaatcctgacactagatgagtttctcagagaatatgatataggaataagacccatttgtaagcataaaaaagaaaagaggcagcagagacagagaagcggtgattaggaggaagaaggtaaatcagtatggtatatcatcctagggtccaaggaaagagctttcatcaactgtggtatgtgccagagaagaagaaaaataaataagaaaatgtttgagtttggcactgaagaagtaggtcattgttgaccgttgggtgacaatatcactacaaggcagggagcgggaagcctagcttcagaagattgaagaatgaatgtcttataggggaagggaggtacatttgagaaacttgagtgtgaactgaaaccattcaaaagtagctagaagatcagcatcagaagacaatagtgtcaccatctttaatggaataggacggtcctgtataggttagttggtagagatataaactggaggaagccacccctctaagccatcatatctccatgagtcagtgaagatactatctaccatgtgggatcactgcaaaaataatgtggtatgaagatacacagcacagagcatggcgggtagtaatgacccattaagcatctattattttttgttgccttcagattatttttcctgatatatgctgtttttttataccaatctaatagcccctcaagtgagtgtcccctgtgtttgtggacattagatgagagctcaaggtaagcccatcccaaccttttttttttttaagtcccttgggatcccagagagtctcagattgtacagcagcagtctcagattgtacagcagattgtacagtcagattgtacagcagagtctcagattgtacagtagacctatcagggaggaagagaatgctcaaaagtagtgacttgaatagtttctgttggtctacagaacccgcagagcatatgatgggcctcccaagtaacagaaataccaaaagcaatagctagaccatatgctaagccaacacaataaccagatcatgtgctaagccaatacaataaccagacaattgtattgtgctaatacaatagccaaaccatgtgctaagccaatacaatagccagaccatgtgctaagccaggaccggctttatttcatttaacccatcccatgatgttagtagaatttcacacatgagaaatttgaggctcagaagggcttaacagttgtcatttgttgcagttctcatgtgagggagaggagggttttcagctcatctatgtctggaactcatgtgatctgccaccactctctaggcctctttctgcttcagtgtttttgagaccgagaaattgacctagcactctggggtacttccatgagcactcaaccaggaggccaaaaaaaaaaaaaaaaaaaaaaaaaactaacatcagccccgactcagactggggaaggagggtcacaggatgacagtgatactagcacagctagggtcaatggtagccagtgtaaaaagaatgagcctgtttctaaacagggagggtgaagaggtggccagtggcccaagggcagaagacagatcacgggcctgtcaccccctttaccccaaagcactcagatacaaaattggaacagacccatgggccacagcttgaacctccagcctggcaaaccccaacacatttctcgactttcccagtgccctcttcagccacataaagccactacttcacggagacaaagagagctccagccttcacacaaccgcagtaattgtagaggtggccggccccccaagtgactccacccaactcagacacctcagaactgctactctgtaaagcacacccaaagactgttacctctctaaatgaggtgagctcaagatgaaagaccaaggcgatcattttagacgggcttatgcgtaattacgcattcatcagtcagagctttaattacccgagataaaggtaccattagtgtttcggggaaaactggctccagcaaaatgcatttcttttgtctccaagccagtgacaactaactgttatccttggaagggcttagcagacagactccaacctaagccataaaaggcgatgccactgagcaagctgcagcattcgtgggagatgtggcgcagtctggaaagcccacaagagctccggagacaagggcacatttccctgagtgagagtcacatcagggacagagaaatagaggaccgaaatgaaggggacgggggaaacttaggagcctcacttagagtatcaccttgcaactccctggcatgaaatgcaagatctcaggttccacccacacctactaaatcagaatccgtatcttcacgtgacccccccagatggttcacatgtgcattaaaatgtgagacacgttgctttcaggggctccgtacccaaggacaagatccctgctgttcgttatttcaaacaaagagctggagtttgctcacctctcctatttatctgtgtgtgttacagagaaaaaactggaggcagaacagaaatgtgtgcggtggggggaggagtgtttttcttttcttctcctttttttcaacatctggcagtagaaatagcttttcccttccagtgttgctttaaaaggtaaacatcattgaatgggggcaaagtggggcggaaataagaccataaaacacacacaatgccaaattgaaatgattaacaaagctaagaggcacagcatcccctggtgcggtgtgagatgcgacagacaggtcagggcaaacactagtgaatccgtttcagtacctcccgcctaagggctggaacaggcagcaacagagagaaaaccatttcacaatgagaagaggaaactgtcaagaaagcaacctccgaagaggggggacaaggtgagaaggaatcatatggggagagaaattctttgggtgggctgtgacagtggtatccacaggtatccacaccacaggtgtggtgggctgtgacagtggtatccagctctgaaccacaagattggatttgcagccataactcccaggcatccaacccagagctctgaataattaaccaaagttctgaggtctgaggatggatttggcttttaatcccaatgctgccacttagcagaaatgtaaatttggaggcaatataaattttctctttgaggcttgatgctcatctgcgagatgaggataattccatcaatgtcatagggttggaaagataaatgagatagtgcattttaaacctaagcaggatgcctggtacataccacatgcttaaaatgacagttattatcacttattattttcctaccaagtactctcagcattattcctttcccagcaaatttcttctttcagccttgaccttaattggtggtctgaaacagggataggaagtgattaaatgattttataagcaccatcccccactttcttagatctcccaaagtatgatcacttagcccattcattcatttttttttccaacaatattctgagcttactgcatgtcaggcatatgaaccacgtaaattacacttagtatctaagcacctgttagtatctaagcgccaatggaagagggctcattatgaaaatgcacaaaaccaggtgaaaatctagcatctttctgatcacatgcacctgcattttctatgacctgtctctggagacgtgcaggatgaggtttgagccaactctctgggcctcctggaagtgaatctatgggctcagaaatgaccccagtgctaagtgagtagctctgtaattactgtgtcccacaaagcatttcctgtctgctgtgtccctgcactgcatatggtgtcagatgagggacacagggccagtaaagccaagctcagttactcctcaagtggcctcttggcactgctgtgtggtctgcatccaagtccagatcatccaccatacaggctcatgccctttgtcccaacagtggtagaatgaggaagcaggtggatctgcacaatttcacctcgtaggaggcagaaagggtggcaggaaaggcctcaagagcaatggccagtggctgatgaattcttagtggcctttgtcagagactgctgacaccataaggagccccgcagaagtgctgaagggtagtcatcaatcagtaggctctgagatcagacaaaactggatgtaaatcccaatttggccttttacaaggtatggccccctggcaagttgttcaatctctctacactgcagtttccttgcctgtgaaatggggatcctattagtagctacttttgtatcattcagggtttaggtaggaacagatggcacccttatattgagtaacttcaggagagtttaataaaggaactacttacaaatgagtgggcaagatgtcgagaagtagaagggaacagtgcagtaccctaggaccagaaacagtggggactatcattatccaggcctgaagggacaagatcttagaggaagaatgatgcagctccacagtagctgtgaactctggcgagatgcagccagcacaaggtcttcctgaaagatggggttcggggaatgaaatatccttacctcactttcctcccctcactgtcattggctgagccccactggaagcccaggggcaacgcagcctctagatagtgtcctgacagcccagcttcctgggacacagagcaggggaaaatgcgcttgcttggctagcccactagaatcccagagcatctggggtctggctggcttacgctcttgatttcaacctaatgatgcttgcatcttgcactgaagtgctcttttggaagggcttacctcgaaatgaccctctgggcaatcgtaactccctccagatcattcagcagctgccctaacccaggattctaattcttctgaaaaagagaaatcactccaccaggatcaaactttcccttcagatccccctgaatgcccagtactaacccaggacccagcaatgtgtttaattaatcttccgagatcatgaatctcttctgggcccagagtgttttatttggaaacttgatttaattacattttactttgactttctcagggacatccatgaaccatccatgaaattccccagaggatactgtttgttattatcagctccctctactcttggcctccactactactggcagtctataaactacactgcacctggctgtaaaccaccacccactttatccccagaaggaaaaacagcaatggattgcaaaaatcttggcgtcatttgcaaaccccctgtagcgcttattcatattcaaatcatttcatccagagctcatctaatgggcaaaatagaggagatgaaacaattcgcattagggtcaacctcagagaccaccagaaccagtaatccccagggagagtcaccaacacatctgaccaggtaagactgcccaacctccagacggcctactagcttcttcaacaagtgaacaagcagctcttctcctgggagcatctgggctgagtttatcagcaactggtgttttaatgcactggtgaaaagtgcaatttgaacataagagagccacaatttggtctcaggagcaaattcaaacataagcatgcatgctttaaatggatgctcaagcttcaggatgccttgcatgtcagacctggccttataaacatttctataaacctgagctttatgatcagtttccccagttcttttcttaaacaaacaccaaaggtaccccttagtacttctcccctggcttttgacctttcgggacaccaagttgtggctaggacccgaagccacagaggcagtaccagagtggttcctcccaggaaccatggaggctttctcggcctcagtttccacatttgtataattgagtcaataagatggtctatctcataaagaagctgtgaggagtgagcaagagaatttacacaacatggagtccaacagacagtaacactcaataaataataaaaacaggctgggtgcaatggctcaggcttgtaatcccagcattctgggaggctgaggtgggcggatcacctgaggtcaggagttcaagaccagcctggctaacatggtgaaaccccatctttactaaaattacaaaaattagccgggcatggtggcatgcgcatgtaatcccaggtactcaggaggctgaggcaggagaatcgcttgaacccaggaggcggaggttgcagtgagtcgagattgcgccattgcactccagcctgggcaacaagagcgaaactctgtctcaaaaaaacaaaacaaaacaaaacaaaacaaaaacaaaaaggaaaacctgtcccccgaccctgataccctctctttttccttctatccctaaagctaattaaagtaacgtgttaaacactagagaggtctgtttacaggcagtaatgagaaacccacaatcatggaggtattttaagtgaaataggccatttcatctcattgatggagatgcaggaaagggtggagctgttggggagggtggatatgcataggccagtttgatctgggggcttgaatcagagggaaggcattaagagccattttagtagctataggcggatcagatgagattcagctcaacacctcttaactagggagatgctgactcagttgatgaaaactggaaaaactgaataggaaaaaatgaatcccatcgggctgcctccttctgcacgttggctgcaaggctaaatgcatcacaggcttccaataaatatgaactaatcatcaaatttaagagcgaggaaatcattgttctccccagcctggccgtttgcccagctgctgctcagagggtgatgagttgctttttatctgacagtggatctcccctttgcccagagaaactattaggaacccaaccagctggaagactttctcagcagtgtttgcttggactgtgttcctccttttccagtacaatcctcacaccgcaccctagggaatctcacccttgacatttttttttttaaataagcaacttgatttgctccaatttccctaaggatcaaagtagaaaagagttcacttttggcttccaggaccatagtgccaggaatggagttatattaaaatcggttagagcctaggaaggaccagaggagaaggttttccctcttctttatcccctctccccacaaaagaacaagtgccactagttccttaagtgaggagcatcctgggagttccatgttgactcaaacctggagtcagaaggtcctgggccacctacaatggatttattccctctgcattcagtatccccacagtcttcttctggttagttcctgcttcctcttcctgttgagttgctccctgaatgtcaaaaacggggtttattatcagagctggcaaagaagtcgagtgtctcaaaaaataggggtcaaaatgctttttaaaggtaattatagaaactctttgtttcttagctgtctctgcgccatagatgcttccaaaatatgaaaaataggccaggcgtggtggctcatgcctataatcccagcactttgggaggccgaggtgggaagatcacttgagcccaggagttcaagaacagcctgggcaaaatagtgagactccatctctataaaaataaataaataaatagtcaggcatagtggcgcactcctgtcgtctcagctactcaggaggctgaggtgggaaggattgcttgagcctgggagttcaaggctgcagtgagctccgatggtggcactgccctcaagatgctgtctccaaaaaaaaaaaaaagaaagaaaaatgaagaattcctgacaaaagcattttatttctaaagaaaaaatatgacctaagcaattttaaagaccaggagaaagggtatccacatatcccaaatatgctaagtaaatctcaaaagaagagattgaggccaaagatcttttttgcttactcagatttttccctaggcccagttcactttttgtttgttctaagctatggggacactcaattccaagccaaccaaaggcagaaaaatctcagtaacagaaacatttgaagaaatagagcactttacagagaaatcatcaagaatttcctttgacaatttcaccaaatataattaaaattcaccaacttcaaacttttcctatacacatggatttctggcacctgtctattgtaaatgtaagacacacatctacagaagttgtaacttttctggcgttttatctttggaaaagaataccctgtcttgattatactcaataagagaattaagtttatatttcaggccgggcgtggtggctcatgcctctaatcctagcacttcaggaggccaaggcaggcagatctcttgagctcagttctagaccaacctgggcaacatggcaaaaccccatctctaccaaaaatacaaaaaattagcagagcatggtggtgcatgcctgtggtcccaggaactcaagaggttgaggtaggaggatcccttgagcctgggaagttgaagttgcagtgagccaagatcatgccactgcactccagcctaggtgacagagcgagaccctgtctgaaaaaaaaaaaaaaaaaaaagtttatatttcacaaacgtattactagtccagagagactgtgaagaagtgcagagtggagaacttgactagtggagaactgactccatcagattccaccagcgttaccttctggattcccttcctaattcccatcttggtgtggctcacagaactctgacaagtgagattctgatcctgcttaaaggctgcctgtccttctttaggagagctccagaaatccctgtatgggtattcactgggccaatctttctgcatgtaggtaagtttgatgcctcaagtgtgcagcctagaagtccaagttagaaaagcaatacaataaaatagccaggagaatccaagacctccattgctctctatataggcttttgaaggtctccagcatcaacccccagaggagataagaggcaaggatgtcttctgcatctgctctgggtctccctggaggaagcttattttagtttttcaaggccctacttggtgtgtgactatcaggcactaggtagacaatgattcaaattcaggcaagcaaacaaaagaaaacttgggtgtcactggatacgacaattatcaagagaatctgggacgggcagatgaaatctgaatggagaaggtagacattcaagttaaagtcacaaccagcatcccccatccagtttacacacacacacacacacacacacacacacacacacacacgtagctcccttctccccttagcaacataatcagtcacattcaacatgaattatcaatgacatcatgtagttatcaataaaactcaaggaccccagcatgccttcagctgacacctccctgagttttcactgatgaattcagagccaaatatgtacaaaggtaagaaatctccaaaaaggaatcacttaacccagctcagctgttctttaccttaggctagtgttgagaggaaagaaaaaaaaagaagaaaggaagcgatcccataatatccatcctcaggcctctgagccagtttacctaaacgttgccatggcaatgtgtatataagtcagtcttcactctgaaccacaatctctgacttgacagagaacacccatttgggttccaaagtcaggcaatagccaggcagtgcaacagcacgtttttgttcaggttgaaacctgatattccttgctggctacaggaaatcttgaggatttttttttggtttttggttattcttctctctgtatccatattcctctgttcatctctcccttacttttgtggggagcgaggataaagaagagggaaaaccttgaggagaagcctgaggggaaagtaagagctagccacacccagcctggccctctgagttagccaggagcagagggaagagggaggcttgtccgggcacatgcttctgggtcctccctgctttatgaagctgaaatgcagagcgtcagagctggagggaagctcaggcgagaacctgaaatcccggggatgggaagtgacttgcgcaaggtcacccaacaaatgagcaaaagactcaggacagattcagtctcttgattcccagtccaaggcttttctacagaaatgaccgtggaccctcccagggttgcctatgaaactaacatacttctcacgggaagcactgtgcctgtcccgaccaggaggggctcaatggatgtgtgatgaatgaatgaatgcaatatcagggaatcaacaactctttcctttcagagtttccggattccaaagtatatccacatcaacaaaataaccaatagcaaaggctgcatctccaagagcctagcttctcccaggtccccagatctatccacctctgctgagattaagaactagcagggccctctccaaggagtcactccgctgcccattactagaatttttatcaagtagctgacaaaccaaattataagccgagtgtgtgtcctttgtgtgggaggatggtgggggcagggtgaggagggaagctgttcacgtattttttgagtaaaggttgcaaatgcacctcttatacatcctgcctccccgtggaccatgaagattttggaccatgaaggttcatttgtaagagcgtcttcttggatcagcagtgtcttctgtggctccagaatagagccaggttaattagaacctaacggggactgaaccaatggcatgcccttatcttaaatgaagtcagttaaattactatgcaattgcatgccccatcacacacacacacacacacacacagcccgatggcacccccaacaagactgctcatctttaaacagaaaagcaattggaagaaatgtgtaggttctgcagagagagaagctgcatttagaaacaaaatcaccttctctggataagcttgctgcatcctgagcttttgtagccaagccctgctggctggcagcttggtttgtctccttagtgagaaccgtgatgcattgggctggctcttggcttctagtcctacttgtaatttgaagcaagggtagatggctggggtcagacagcaaggagcctgcaggcttagaggggagcctccttgcttgaacagacaacacagggtgtccaggtaggaggcctatagctctgcagtgccctgcctcctaaactgatccttctgaaagtctaggagaggggagaattcaagattggccttaggaactctctagggcagagacacataaatgctcaatggcttgatcttcccaggacaacgggagatgtcttatttaagtaccagggataagacagatgctgctgtcacttcttgagaatcttgagggaaaaacaagtacagcacttggcccatgataggtactccataaacatttgttgatttaaaccaaatgtattagtcagggttctccagagggacagaactaataggatctatgtctatataaaagggagtttattagggagaattggcccacatgatcacaaggtaaagtcccatgataggccatatgaaagctggggaagagaaaagccagtagtggctcagtccaagttggaaaccttcaaaaccagggaagctgacagtgcagacttcagactgtgatggaagggccaagagcccctggcaagccactggtgcaagtcctagagtccaaaaaccaaagaacctggagtctgaggtccaagggcaggaggaccatccagcatgggagaaagatgaaagccagaagattcagcaagcaaggttatcctaccctcttccacctgcttcatcctagctgcactggcagccgattggatggcgcccacccgtattgagggtcagtcttcctctctcagtccaactcaactgtcagtctcttctagcaacacccttacagacacattcagaaacaatacttcaccagccaactaggcatccttcaatccaatcaagctgacacctaatattaaccatctgatatggtttttctctgtgtccccacccaaatctcagcctcattgtttggttctgtgtccccacccaaatctcatcgtctagctcccataattcccacgtgttgtgggagagacctgataggagatgacccatggtggcgggtctttcctgtgctgttagtgaatgggcctcacgagatctgatggtttttaaaaatgggagtttctctgcacaagctctctctttgcctgctgccacccacgtaagatgtgacttgctcctccttgccttctgccatgattccaaggcctccccagccatgtggaactgtaagtccaataaacctctttcttttgtaaattgcccagtctcgggtatgtctttatcagcagcatgagaacagactaatataccatcacaccaaggtaacctactctgcccttttctggattatactatcatcatatcaaggagaatatagagtgttaaagggtgaattaaaaagtaactccagtttgactttgaaatccgtaagttgtttcagcagatttcctttgtcgattgctttagtcaggttgatacaggaagcatctgttcaggaggccacatcaatggttagtaactaggggagtccagaagtaggtgggtaggtatcttgggctgagaagatttagacaaaattctagaaaaggcaaagctatagagatagaaagcagctcagtggtttccagggacaggctaggggatgtggattgactgcaaagggcacacaagaactttccggagtgatggaagagttccctattatgagtgtggtgttggatttgcaatacagtggtcaaactcatctaagtttgcatgagatgaagcaaaccatgcaaagcaggctcatccctgtgttacagcagggacatggtaccaaccaaaggaagtggacctgctgggtggaacatatgtcttccaagatgagtcagtcaggaacaaagcttagagtgggctccacgtgtccagagtcccaaaggccagccttgaagacagtcaagccaaggccaaggtgagacctgattaactcttgactacacttgcaggagtttgatatctcagacctgccacttcccatcacagtccagttgcaatagacttcaggagtgtgaactcaacttcacagctcaaggaaacatatgtaaccatgaatttatcttcagagttgagtacatgtgtttcaaaactgataactgacttgtttttctgaattctctgctgattaaaataatcagagaaagtccaccctcccaagacttctggactggtattcaagaggcctcagttcgccccttaaaagctgtttaacctcagcatgtcaccgaacctcagttggaaccctcactaccaaggtactatttgtaatcaaagaactgtgctgggtactggggacgcaaataactaggacaaagaccctgccctggagaaatctacaaggaagggcaatacttcaaccaagagtttcagaccatgccattggagctaagctagaagagcacaccaggtttacacagggactgtttaaggagtccttactcttaaataagttcatatcagagtaaaaaaaagtgaacagctaaatatgaatttgcattccaatgttagaaataatatattttttaaaattatttgaataaaacatttacatagagccctctctgttccaggcattttttaaagcagttggaacataggaattgatttaaatcctgaccaccctaggtactaatatcatgcccattttacagatgggaaagaagttaacccacagttaagccagctaggtgactggcttatgctctaagccacaacccctgtaccttggtgtgctgtaaaactttctgggttagagtacaaaatgggccaggacagccactgggaagggaattgaaggtagtccatgctacagtccccataccccatagtggcacccatgccactctgggtcgtgtctttatttgtgacagggtctttcgctgttgcccaggctggagtgcagtgacatgatcttggctcactgcagcctcgatctcctgggctcaagcaatcctcccacctctcagcctcccttgtagctggcactacaggtgcatgccaccatgtctggctaaatttttaattttttgtagagatggggttttgccatgttacagcccaggctggtgttaaactcctgaactcaagccatccgcttgcctcagcttcccaaagtgctggaattacaggtgtgagccaacgtgcccagccatgagtcatgtcttatagtgtgtgcactgaagatatttatttccatcaataataataattaaggatagtggtataatcatcaatggattggtttaatgtcagatatgcgctgatgaaaccagcaaaattataaaaagcaacatgttaacatggaccaaaaattttatagtaatgaaattttacaattccaaggaagtagaaaaagaatgatttggaaatttaggattgggagccaggctcaaaaggtgcaagaaggggaaggcattccaggtaacaagaatgacgtgtcctgaggcaggaggttgtcactgtcatgcgttgttttttaaaattagctttattgaggtataatttacatacggtcaaagccttctgttataaatttacaactagatgagtttgacagctgtgttgcaaaaccaacaccacactcatgatagggaactttttcattgctccagaaagttctcttgtgccctttacagtcaatccacatccctcagcctgtctctggcaaccactgagctgatttctgactctatagctttgccttttctagaattttgtctaaatggaagcgtgcagtatgtcgtcctttgggtcaggcttatttatttagcataaagagctttggagagtcatctatgtcattatgtgtaccagaagtctgtttctttttattactgagtagtttttccttgcatggtcagttataccacaagctaatgtacatttgggttgtttccaatttggggaataaagctgctatgaatatttgagtacaagtctttatgtgaacatgttttcattctcttgagtaaatatcaagaactgggattactgagtggtatgggaagtgtatgtttaatgttataagaaacagctaagctgttttttaaagtggctttgccattttgcattcccaccagcaacgtatgagagtttcaattgctttacatctttgccaacacttgatgttatcaggatttctcattttttttgagatggagtctcgctctgtcgcccaggctggagtgcagtggcacaatctcggctcactgcaacctctgccgcccggggtcaagcgattctcctacctcagcctcccgagtagctgggattagaggcacacaccaccacgcccagttaatttttgtatttttcgtagagatggggtttcaccatgttggccaggctggtctcgaactcctgacctcgtgatccgcccaactcaacctcccaaagtgctgggattacaagcatgagccatagtgcccggcctaggattttcctttttttaatattagcccttatagtgggtgtggtatctcagggatgtaagttgtgtttccttcctgatcaatggctaatggtttggagggtttttttcatgtgcttatttaccattggtatattttctttggtgaatattttgctattcttcattgagttgtttgccttctcactgaactgtaagaatcctttatgtattctggatacaagtcttttatcacgtatgttgcatatatatttctcccagtccatcacaagttcattttaaatgacaatgagtctatccgtccagccagcatccaaaactgaattgaccatctcacctctcaatgaccagcccatcaccccctaagaaacaaactaataataataatattttgatacatcaaggaaattccattatccaagagaggtcctgacagtccataacttggtttctagtcctgttgttccaatagagacagaaacactaagccaagacaagttttcctaaagaaaaagagtgttgagaagcagctaggattgggccaatctttgaaggagagttttgatgacgttctgttatatttggacatggggacaatgtgattagtaatttccttccttcatcttgctcatgcctcagtttcttcatctttcagctttgtattaaaacaacattcatacagaaaaagaatgcataaaacatacgtgtaaagcttaatgagttttcacaatgagttttttcattttagtttaatggggaaagacagttggcctctagagacaacatcaagcttcacagaatcctgtactaggctgtgtatgcatgtgtgtgtgcgtgtgtgcgcgtgtgtatgcatgtgcgcatgtgtgtgcatgtgtgtgcatgcacgtatgtgctcatgcacatgtgcacactgggattagagagtaaaatattaaagaaacaattgagtaagtacagtaaacaactgtacattttaaaataacttaaagagtgtaattggattgtttgcaactcaatggataaacgcttgaggggatggatactccattcttcattatgtgcttatttcacattgcatgcctgtatcaaaacatctcagataccccataaataaatacacctaccgtatatactatatacccaccaaaagtaaaaataaaaaaataaaataaattgctacctttacagaaaacatcctacatgctttacaatgaaaattgcatctaatcttcataagagcccctaaggtagctaatattacacccattttagagataaggaaattttatggctcagaaaaccaaaataacatcctggtattacatggctagaacacagtagagccagaattcaaaccccatcctgtctgagctcatcgcctctacaccatctctgacaatggggacttatggtctggcaaggagaacaggcaaaactatgtaaggaaggatatacatcagtgggaaaaatatagatgcattaatcaatactttcatatcaatcttattttccagttttcagattcaaatttccagcggcctactgaaaattgccgcatgggaacagggaattctgtagccacctccaaatgagcaaatccaacatcatcatccctcccacctccacctatgcatgcacacctggtctaccccctcctatatcccttacctcaatcagtgtcgtaattgttcaaacaagtaccttggtgactctccctcttgcttcacacatccaactcctgctaaatctaccttctaacttcttgcaaaatggtttctgcctctgtctttccactgctgttgccttagttgaggccacctgatagttctccctactcaaatctctttattatacagtcagtgtaaccctccaatgcacacctaatgatgtcactcttctaaagtaaaatgtccctcctttagaataaattaaaactcctgtatgtcaaaccttgcatgcctgcaattcaattctaatttatattcttgcaccatcttctaccattacacccttctcaccaatgactccaaacttttctccattccctaaacacacttttcttttttccagttcaacaaatgtttaccaagtgcccctttatttgcctgtgttgggcatagggatgtagagcaaggttctcaatcacggcatgattgacattttgggtggatcattccatgttatggggccatcctgtgcattctaagatatttaacagtaaccctggcccctaaccacgagatgccagtagcacctcccttcaaaaatgtgacaacccaaatatctctagacattgcccaatgtccctcagagggcaaattcatccccagttgtgaggcactgctgtagagtgagagatgctccctgtcctccaggaacccttggttggttggtcacaatgggcatgtgcatcatgcaatgcagcatagagcagaagtcgccagcccccaggccatggaccaataccatgttatgaaccaggtcccacagcaggaggtgagtagcgggcaagcgagcattgctccctgacctccacctcctgtcagatcagtggtggcattagattctcataggaacatgaatcctattgtgtactgcacatgtgagggatctagcttgtgtgctccttataagaatctaatgcctggtgatctgaggtagaacagtttcatccagaaaccatcccacacctcacaccctgcccatactgggtccatggaaaaactgtcttccacaaaaccggttcctggcaccaaaaaggttggggactgctggcatagaggttgctgggaatgatggctctagacaggtccactctgagttagtatcatgacccttctccttccttctttgagactttggacaattaaattcaactctctgagccttcagtgactcctgtataaaatatggattcgaatttcaacttcaagatctgctgtgtacattatagaactgaatatgtgtaaacatttgacatactaagaacttgaaaggaggtattttcccacccttcacccgcacaccctccacatccccaggacgtagccccaaagtaccttttgtgcttctgcagatgctgtttcttccccttcggatttgagtccctctccccttcccacctgctgatgactcctttaaaattcagctccaatgtcagctctgatacattcacagtggcacagaagagttgagtaccctttgtggttctcacacactttgcttacatctctcttagcatatttgactacctcttcttctaggtcaagttagcaaactttctgttaagggccagcaagtaaacattttaggttttcagggtacacagtctgtgtcacaactattcaactcagcactggaggtgaaagcagccataaacaggaaatacatgggtgtggctgtgtttcaataaagttttatttacaatgccaccatctggctttgtaaatgaaagtctgtcttattaacttttgtaactccagcctcttgtacagtacctggtacatcctagatacgatttaaatgattaagagagcaatagatccacactgatcatcataccagtattaataaaacacataactgtaaaatattttgagagtatgagaataaggagctgactaaaggaataaaaaccacccctgatgctaattcaataattaaagaatcattatacactttcttctctggagtagaaaacctttcttctcttttcttctcttgagctgtgagtcaaggtttagatgtagatgtggcattgccagagaaaatacaggatgcctgagtcttactataagagaaataattgatatggttttggcataagtatggcccatgcaatctttgggacatattaaacctaaaaaaattattggttgtttatctgaaattcaaatttaactgagtgtcttttacttttatttgctaaatctggctaccttgtataggtgtagagtggttctgttttcttctctccatcttcttcttgcagaagaggcgtttggccccagaaaagatgagaaccagtctgacctgctcatccaccttcccgccccacccccccaggaagagggccccgtgaaaaccacatggcagttctgttggaactggaaatttaattaacaaaatgctaacatgtaatttcagaggaggagggaaaaaagcgttatcaccaagttaataagagaactattttaattacggcatttaacaagttatgaccaggccactgcattctctagggaaggattcacatcattcaagaatcttagagcagggaagggacgtaatggagccgaggtggaaacaccaatacgccaatatcccgcatgtctctgaaagccatctttgagttctctgtctccggcatttagaagtccccaaggagccgtgttctttctctcccatgactcagagaagaaaactagctgtccccatctgtcatgtaaagttccagccaaacaggacctatggagacacataaaacccaaacctgacatgcagagctggcctttgtccctacatcctttggggtgaaatgggtggttttctttggcaccacagctccctgtttctgggccttcctgcctactcatcagtccatgctgacatctctgtctccttcccccagtggaccaaacagcagaatggacaacagaccttgacacagggtcagggaaaagagacggtggccacgcctgagagtgattgggaggctgtggcgagtggtgtcacggggtagaaatagctctggtggcagagtcagatggccctttgcctttgcgagctaatcccaaatcctccaggggcatcagagggcctgttctcagtgaccaggcagtgggccctattctttttcccaacctcaggagaatgaggttgggcctagggagtagaaggaatgtggccccacagcattaaacaagccaggccaggatcaggggtggccttggctttccccatcctgcttctcatgactcccaggcattttgttcccaaacagaatggggcttccaaaggggaaagggtgggcaaagagctggaaactcagcctgtgaaagtggccatagaggagtggaaggcacagggagactctgccaaaaaggagtcgggggaggcacagaagctgccgctagggatttgtcttccccttccagtcaccaaaggagactctccaaaccctaatctgagtggacagtgagttaaagtaaggagcaagtcctggcttttgggtagaggaacctcaggcaatcacagtgtcatttggggagggaagcgaagagaagacggagagaaactacaagtgatcttaatgcaatatagctcagtccaacaaaaatatgcctcattaaaatagattgaatagaccaaactgcctacatggtttcctatactctgggcactaaattctcactgcaaagaccacgtatagttttctccatccttttctttccttcttcctcttcctttctggaacacatcaggtcgaaagccattagtgtagctgtccacactggaaggcagggatgagccacagtgacccaaggtcgggtgtcaggctcaaagggtgaggaaggtgtttacacttggggaagggcccagcatgggtactggagcctgtgcaggatgaagaggcatccgagtggagcagaaggtgaccacagtgatgagggactgggttatctgcagggggattaactaaataagtaaatggactaaagataacaaaagacaaattcctcactgtggggaaaggagtaccacctgtaggaagggagaaaatgagaatgaaacccaggtgctggactgaaaatgaagataatgtaaatgtgagcttttcaatacacatagataaatacagaaataaatatagatgtaaatgtcagtatgtgtatgttcgtgtgtgtgtgtgtgtgtgtgtgtgtgtgtggcatacacttccacataggtctatgcccacgattctgcagagagggcctgggagcggcaacatcccaacagcaaacgagcacacttagttcccagatgtgtttcctatgtattattctccactaaacggaaccaaggctccttggagaaatggctgatttccgggctggggcagggaaagtacaggatgaacctggatcattgttccataaatcaaggagttgctcagaaatgacaaggacaggctgggtgccgtggcttacacctgtaatcccaacactttgggaggccgaggtgggcagatcccctgaggttgggagtttgagaccagcctgaccaacatggagaaaccctgtctctactaaaaatacaaaattagccaggcatggtggcacatgcctgtaatcccagctgctcgggaggcagaggcaggagaatcacttgagccagggaggcagaggttgcggtgagctgagatcgcgccattgcactccagcctgggcgacagagcaagactccatctcaaaaaaaaaaaaaaaagaaagaaatgatgaggacacgtcaaaaaaggcacaaaagtcagctcagaggaggttctgcttgtcaaatctgggataatctgagcaacaaaattaataatgaagtaatggcatatgggtaatgaagaaaataggaatcttcaagtccacatattgatgtaaattaattgaaaattttatgagaaacagaacattttcatagtctcaaaatacttctccaccaaaagaaaaacgtttactaatgacacaggggaaagggataactttatgatggaggactcagacaggcccacctgtgtaccatgtgccagaatctaacaaggacacagcatcatgtaacatccctgccaaagatgcatcccctaaatctaataattagggatcatcagacaaactgaaattgagagatatcctaagaatagttggcctacagcctttaaaactgtcaatgccatgaaagtcaaggaaagactgagaaactgttatgattcaaatcaaacatgatgaataaacgacaactggatctttttgctacaaaagacattattggaacaatgggtgaaggtgattgagctctgaatattaagtggcaataagttatcaacgttaatttccaggttgtgatggctgcattatagacatgtaggatggagctatgttgccttgtagaaagctatgccatttgtagaattacacaggaatgtttttgcagggatgcagtatcacatgggccactcactctcaaatggctcatgaaaaaatttccttgtaccatatttgcgatttttatggaagtttgaagttgtttcaaaataaaaacctaaaaaataaaaaagacttgggtggtggacatgatgaagatatccaaatccagtagtaaccaagggggaactgaatcttggaattctatcaagacaagaaggttgattacagttggctggacccaaagttcaattgagaattccagactcactgtacaacttcatgtcaatgaggcgtggaggagatattgaaggttccaaagatgatgccctgcttcttctcccccaaaaagcttgtgaaatttgataatcaaagaagtgaagccacttgtcttggtactggttcagtgcagatgggcttttgctcctgggcactatgcttatgccttaagttttacaggtgattcctggggaagactttgctgctttgcttccctccaatgtgctcatccaagccagggtgcacctgcgggtgctgtatctccctgtctctgctacctgcataccacctgctactctctgtggaacccaatgaccttcagcccactgggcaatgacaaagcctgagcagggagagtttctttcttctgagagaatgaattgaaaatgcagctctcatttgtccaatattaacaggacaattgcttctcctaggagccgttgcttagacacctctcaggtcttcctatctaatcactttatgccaactactttgggtcaccacagagaaaataaaggggagatccagtagctactggatggaatggcccttcccaggcagccagccccatgtcaggatactgtgtttgaggaatagatgttgggtttctgcagctccatgaaatacagatgtatacacaccagagtcacaaatactcctgagtgtctcacctaagcatatatgcatccaaattacattctcccctgatgaatggttaataaagtttcagaacacacccaggcctccccctaccccaaccccagtttaggttggagagacagcagatcccacagaaaaaagaaggggaaaatgcccagtggaccagttcaagtgtctttcttcataaaactctccagtagagggaagaatgcaaactatgcttcttaaaccctggcctgccatgaggcacagcagcaggcagatcagcaagatgctcggatcgtgtgacacggccctggcacctggctccatgtggcaccctgacaaatcaaacaccaaactgccaggcccattctccgccacctgcactgctgggaatccaatgctcatgtgaaatgcttgagtttgtttagcagtgggggagagcaacccaagggtcccagcatatcttatagtttagccctcagaaataggtactgccaccagcctcataaggcattgccctatcaaggagtatgattcagataatccaaccaaggggcagaaatgaagcccaggctcacactgagtgataagctctgttaggatgcttctgtgcatttttttttaaattgggaaaaaaagacttttaaaaacaagggcaagaaatctgaaggtaggtggttccaggctgaattaatttatcaaatagcagctcaaatgtgtcagggctctgtatcatggttcctgaaattctcctcacttttcctaacggccgctgtagctccaaacatcaaatcctgtatccagcgcctattgtctgttaataggtgtgcaaggatgggtcaaacagatgggacccccgctttggtgcagcttacagtctactgttagtccagaggctgccctggaacccttccatccatctacagtggctccagcttctttcatttctcttgcataaagcagttttgaacaaatcaatctatactcatatattttttgactcaggggtagttttaaagctggcacacccataatttcttttctctgaaattccggccctctcaaatccttgaagagcttttgtttttgtttgagtttgagatggaggcttgctctgttgcccaggctggagtgcagtggcgtgatcttggctcactgcaagctccgcctcccaggttcaagcgattctcatgcctcagcctccggaatagctgggattacaggcatgcgccaccacatctggctaatttttgtatttttagtagagatggggtttcagcatgtttgccaaactggtctcaaactcctagcctcaaatgatccccccacctcagcctcccaaagtgttgggattacaggcatgagccaccgttcccagcctgagtgggttttattgaatgattaaaatatgtcacaagtagaaaacaactggagcagtacctggaacatggtgagtgttcaaaaaaaagtctttcctgtcctcattcttgatagtcaaggttcctggtcaccacgaccactacccctttcagaaaagaggctctcaccgctgtgttcttaaacaacctgctgcctagtgacaggatgggctaggatttatggatgccctgctctcctccacctcagctcacccatgggcatctgagctacatggcttgtactaggtcccacttacaaaatcaatggcaggttaattttgtaccaagcagaaagctgttccacagcttcaggagacactttttaattagttcaacatctcagagatacatgccctgggacatgggtagatggataaatatatggatgcgggtcaagaaggaatctctccttaattgatccgttcctatatatcagttaccaggccacatataatcacatttcatcttcctcccaaccaaaggacatattatttctttccatttgcacatgaaggttcagagagattgaaagatttacttgacactacatagctagtggtaaagccaagattaaacctgggtgtcttgggccctgatcttttttatttctaccatctctgttgcatttatcacagggagccatgggcaagagacaagggcttagtgtgaagcatccctgccacagttaggcaaaagcctcaaagcacccactttagagtggtgggaaaaagagtttcgcctattcattcaacaaacacacttgccatgtgctaagaactggaagagtttagaggattctacaatcaagacacagaagaatttcaatctttaaggacctcacacctaggtaggagtcaggttggtgggaggtaaatgcacaagtagttcattattttaaaaataatgataaaagtagaaaaagaatcaatggtgtctacttttttttttttttttttttttttttgagatggagtctcgctctgtcgcccaggctggactgcagtggtgcaatctcggctcactgtgcaagctccgcctcccgggttcacgccgttctcctgcctcagcctctccagtagctgggactacaggcacccgccaccaagcccagctaattttttttcttttcttttttttttttttttttttttgtatttttagtagagacagagtttcactctgttagccaggatggtctggatctcctgacctcgtgatccacccaccttggactcccaaagtgctgggattacaggcatgaaccaccgcgcctggccctgtggtgtctacttctgaaatgaaaaatatagcaggtttctttttgcatttttggtaagagaaggacctttccaagcgaaaggtattgttatggaactgttaaatctacataaatagcaacagagtccgatgaaagaaagaagtactgatttgatactgtttgttgctgtgcaggaataacattccctcctgattttcacacattctgccaaatgggaaaattcccctccacctccctgcatcaaatctaaatgccaaagctccagggggcacgcaacagggaggcccatgctgatcgggctctgctgtaataggttacatgcaagaaaagcagccaaggggaaggaagagggagatgaagtgacaaactgaggccagcactttgatggtgtcattttgggcaagtcattgacactcttcttgtcgaagtttccacttctctgtatactgaaaataactcactttgccgcttcactgttaaaacaagccgagttccaccagttcaggcctagcataacttggtaataaaacaaagaggaacagaccctccctgcccttcatcttctttgcctaggagaccgtgtttatcaagaattctaccttgagagttgggttagtcttcatccctaaaacaagtgttatctctgagctcttgggttcttccgtctcacacttgctgcctcatgggttctttcgaagccaacctctgcaaccatcctagaaggggtcaatgtccaatgaacactaagactttctggttccttgaccattatttgaatgcttttcgctgtctatattcttcccaactcactctcacggcatgtcttggatttttcatcacccaaaatagtcctacctctgaccttttaaaatctgaggtctctgactcaatgtcctatctttccagcattttctctatgcccattctctcacctcattatcatctccacactctagacccctcccttttgtttaaatttgccacctcactcctagtgccattttcttcccaacccagcccatttgaccatggtcattcttatgccaataactctaacagtgcttcccatcattccacttctaaccgcacttatggaccaagccaacaaaaggtctgcttccctcccatatgagagtggctgcataccactagtctgctcacagacccctacacatggggagggtacggagtgtcaagagccagtttcagacaaacctctcacagtgctcagcaatcctacaattttctaatcagctccatccttcattcttctcagtggcaatgccagaattttaagcgtcttctgccatcattcctgatacagatgatcttgttttctatttcactgaaaaaaaaaaaaatagaggcaatcagatgtaaacgtcctcacttagtgcccaaccctacctgcagtcttgccttttcccccaggtctctaacacaaattgtaccttcacttgtatccaagattaatccatgcagtcttgcccatttcttccaaaacatcctgaatacgattgaccccaatatgtcttgcatgtttttctctttctccattggcttctttctctcattctattaacaccctcaagtgttttctaccttaagagtctattaactttccatgtcctgtaaataatattctctttctctcttcattcacactaccttatttctcttaagtgtaacctacatttaaggtatcttgtttgtttgtttgcttgcttttgaaacagggtctcactctgttgcacaggctggagtgcagtggcacaatctcactacagactcaacttcctgggctcaagtgatcctcccacctcagcctcctgagtagctgagactacaggtgcacgccaacatacccagctaattttttattttttgtagagacggggtttcaccatgttggccagcatggtcttgaactcctgagctcaaggtaaccacccaccttgggttcccaaagtgctgggattaaaggtgtgagccactgcacccagcaagccatcttctttctcatctctcaatgatccttcagctcactggatttgtttcctccttctctgtcctaacacagctctcaccaagtcacacatgacctactagttcccaaacataagggtgtttttcaatcgtcttatttgttctatgtttaccctattacctacaatatccttctttaaatgttcttctaattccatttcagacactctccattgtttcaaatcctcttgcttctcctctgattgctcctcctttcatgaacttctctttctctatccatctctcgaatcttggtgtttccgaaagctctgttttctaaccactctacattatttcccatgggcatctcagtcatgtagacgctttaacctccatccacacatccacatgctaatgacttctcagtgacaggcatatcccagactactctcgtgggttccatactcatagacccagctacctgctaaacattttcacgtggacctcacatgggcatcgcagacttagcatgtcaaaacttctaaacattttactcttcccagctgcttgctttcttgatctccctgtctctgagactagaaccaccaatagccttttgcccaagtcagaaaaccaagagccaccccaaatgctccccttccttacactcacatataattaaaaattgtctagttgacctcaccttcccaaatctctgaagttaattgccccctctccatcaccattgcataacactgctctcagtttcctagctcagaattttgcaaatgctcccaactggtcttcctggctccagtctaagtcccctaccatgcgtcccctgcatgacaccaaagtcatctttctaacatgtaaatacggtcatcccattgccatgtacttaagattattttttggctccttaatgctgataggataaaaagcaccctgctttgcatggcatataagactgtttgtgatctgacaccttcattcctatgtagcctcatttctcatcatggtttctgttgcctctgacacttcatatctataattactcaccatcctggaatagcctgtgttctgacaacctcagtgccttaatatgtggcttttcatctatctgacatagcttatctctcactcccacttccctccccatgtccccttgcctatcttgggagtctcagctcaagcatctcacctcctgagaaatctctcatgaccacactggaaaattttggagctcctcgtctttctgtcttcatctatcactaggcatcaaacaaaactccattaaagggtgttcatcttcccctctcttttctccaagggaggaacctactttctttcactttgtcttccaagggtctagactcaggtatagtgagtgctcataaaattatgttgaatgaatgcatgaataaatgaaataaaagaagaaacaccactcctagtcttttattatgttgttttttgagacaaggtctcactctgttgtccaggctggagtacagtggtttgtgatcacagctcactgcatcctcaatgcagtgagttgagtagctgggacctcaacctcccaagcagctggaactacaggtgtgtgctgctatgcccaaatagtatttttattttttgtagagatggggtcttgccatgttgtccaggttgttctcaaactcctgggcttcagggatcctcctgcatcagcctcccaaagtactggggattacagccaccatggccactcctagtctttaatcttaagcattcatcacttaaaacaaatgtaccagtagaaggaaaggaaaaggaacaacatcaataaatgcaaccaggtccaaatacaagggtttttatctaggaaaattattttacatattgaattacataactaacatggatgtctgtaagtattacttttaatggcaaaaaccacaattattttgcaccaacctaatagaagaccattgactatacatgagttcctattagagtgcaggattgctgatatcaaatcatcctccacatccacgttctagaagcattcactgtgtactaagcctcctagacctctgaccccattctcccaccacccaaggaatgaaggcctctcccttgagcatctggccactggactgcggttcctggagcagatgcgtctataccccagagagcagacaagccacttgtgcctttagtttccgctccacggaccctttccaccatgacttcatatttcctaccactgatgctctctgttggtcttggcaagaatcagcaaatgcctcagtccactgtagatgggagttgggggccagggcgacccattcagcccctcctgcccacagcttcttgggtatgtgacttagcaacaagccaagcctgggctggggagacaagagcacacacaagcaaccagccagggagggctgctccctgactccagtctagttttccagcttctgagacacattgctttctttgggcctccagagaagcacatgggaacaaatccaggttgaagaggatgataagcgagaaatggcttcaagaaaaaattttttatcatgctgctgcttattattgagcaagagttcccaaaatgttttaaccatgtaatagaatttggggcggtttgcagttaaggaacactgtaatggatgacttcatggacagcatcttcccacaatctacccctcttcacactcctcctatcactccccactttcccatgcccaccaaggcatcctagcattcaaaaatataggatctggcttcttccattcccttcttgagatgtgtatcaaactattgtgtgcggatagccagacaagtgctaccttcttggagaattctttcaaatgatcagacttgaaactagatttttcatctttccccaaactcaacagtgcatgtttatgtactatgcaaactgacacagacctactgatacagatcctaaaaaaatgtcaagccaggactgagagcacgttccctgctttttcctatgctcttaagcaaatatcaccatgtgttgttggtaagtaggcaaacagcagcaaattttattatgacctctgaagactgttcagcaaaataaaatcctaaaagctaatttattgaatattgacaatatatcaggcactgtattaggcactttacatgagttgtgtcatttaacgctcacagtggatctttgcatttgttgataaggaaactaagagagaaaaggaaacttgtccactctgccttcgactatccccaagctcaccccaaagaagggaagcatggacctcccaaaacttttcccagcagtggccttgagtgctcttcacttcttctgaaccaggtcccctcccaatcattacccagctgcaaactcatccacagtgtcttccggttcctatcctacctctggatctttagatatgacctccccagagcttgatccatgactctccttaagaacctctgacttgcctttgctccaaggctcttccacccagctccagagtcctcaaaaccaatttcttacccagatggagggattgatttggccactacaacaaagggctcctgggaagaatttcagccaacatatcaggaatgtcacaatcacctccctacagtcagcaccgccaacactgagtggtgtcaaacaaagaaggagggacagaaaggaaaccctgagaggggtagagacatgcatgccacagtgtccaagcaaagccaccatgtggcccatttatgttgcatcaaccctgattttggtccctcttctaatccttcaaagaatggggtaataccctgacaaggaagatggttccctcctacccagagtttctgggagcattagctcatcagaacctccttgcaccctgccgcaagatgagcttgcacaggatgagctaaggggaaggagtggctgaatcagaagcttatgccagaccatctcaccggtttgaacagatctccctcttgctgcttagatggtagatcttaagaaaaatagcctccactgatatggctgcggctttctctgagcttgccttttaatcctgggcctttccctcatcctaccgtcttcctcccccaacccattctcttaggctgttctccctctcccagtcctgttcactagtccttgtcccctcgagcagacaaagggttaaaacatttccgggactggagaaggcaagccacagagatgcaggtgctaacagggaaagtgtgggttggaatctagaatgatctgtcacagttccaagagcttctttggataaggagtgatcacagcttttgctaaatgtctctaggtgaaaattccataaatctagaaactgtgaaactcaatggaaatttaattaaatgagttaatatatagagagtgcttgggacaatgcctggcacgtagtgagctatataaacacttagaaatgagtaatagtttggggaaatacacatttcaacatcatagcattctataggttccagaatctttacaaatgctgatctgaccttggatctctgcattctaagtcactactctctttgccaccagtcctaagattttctctttcctccatctcatttcagtcttcctcctctctctacctaagaatctgagagtttgtgtacatagctaaagattcctctctttggttctcagcaccatgccttagtctgaaatccagtaaaaaccctgatttccctaaaccttgtgttggtgtggcttatgtggtatctttcctatctccttggcagtgattgcattggcttcataataataaccatttagaatcaagctgtaattataggaaggcactggaaagcccttgcaagaataagctttcctctcccagacacactggcaagggttctggttggatttttcagctaagattctctctggaaatctcatggaaaaaaggttagaattatggagggaggtgagaccccagtggtcttaacttcaggaccatcccctcgtgtgcccattgctgtttgatgctgccagcaaaaaatgcagaagtcttcactcccaacagagtaaatgatacttagtgtccttcaaaattacaactcaaagaggatccagggaaaagaagcaagtatgcttttctcttttctaaggcttcaagggggaagggaggaatatggctgagagagaaagaaagtgcctccacctaagtgtgcaagaccccaacaggcagccgacctcccagctttaccgattgctccaggatcaggcccagtcctggctgcactgagctgtggctgacattcttcccaagcccctcatgtttgccaggagaggggagtgacagacgccgctctcctgagacatgatgaaagatatgagtcagaagaagtgggaggaaaattggcattaggttcagggcccagaatgtcagcaactgaatgaggctgaaggaagaggaaggggagctttaagggaaaaaatatgaccatctccagcttctttcttcctactgagatatttccaaaatatgccagatacagagtggtcaagtccagggccactctgagaaccaaagagccctctaccgatgtggtttgagcttcctctgtgccaggttctgttctggaagctgggctgaaaaatgggccagggtaggtggtgtggggatgacgaggcaagggtgatgacctgtttttgatgtggtcacaccatatgctatcagagttgcaggaactctcaggaacggctagtttgcagataagcaagccaggactcagagagggcacaggatttgtctaaggcacacagatacagctccctggttggctgacaagacgttggtttgtttgactttcagaacaatgtgcaagggcagtgcagaagatctggtgcacgaacccagcagagaccaactctcaagtagggatgctgacaagttgtcacctgtgggccatgcgatggacgcagaagtggccatcgtgacaatctcagtacacctaccttactgtcttgttccacttagggtctaggatctgtgattaacaagccttcattcctaaaatatcaaagaaatccaagcaattgtgaaaacacacatctgtgatggaaagtttgttttgttttgttttgtttttttgagatggagtctcactctgccaccaggctggggtgcagtggcgcgatcttagctcactgcaacctctgcctcccgggttcaagcgattcccctgcctcagcgtcccgagtagccgggattacaggcatgtgccaccacgcctggctaatttttgtatttttagtagagacagggtttcaccatgttggccaagatggtctcgatctcctgacctcgtgatccacccgcctcagcctctcaaagtgctgggatttcaggcgtgagccactgcccccagccggaaagtttttaagtcacgtattatgaggcttgtggctctttcagttccttttcagtgaaagggaaagggactcaaacgtctgatttaagtactatatcatctacctaagtgacttaattaaaacaaacaaggaatacctatcgtagcaggaattctgctcaattcagtcagtgtttacctgatttgttaatttcacaaaaagagatgtcttctccctgacatttctttttgtcagtttcactttttcacaagtttctgctttctgtttaattttgtgggaataaaagaacaccagcaagcagccccaatcctaggagagtgttctctaagtgtggcatacagagttccagaaccacagtccctgagtgtttgggtttaaagatgcacattctccggccctacccttggtccacgaattcagaacctctgagggcagagtcggggaatctgcattttaacaagttcccccgtgtaattatcgcacgctgcagtttgatttttaaaacgcctcttctgtgcctgtagcagaaaaaaaacctctggggaaaaaaaaaattatgccagcaacacgactgtgccctcaaagtttataatttaagctggatagaaccagacacaaacaatgatacagacaacaggtcaagggcagggaatggggagtcgacacttcccctttcagaacaatcatcagctctgaaaacatgtgtccgttgttgcttttccctcctagactgtgagctccctggtgacaagtgtcagacttattcatgacagtctccccagcaccttgcccagtactgtttcctggcacagagtacatatttaatacatttgtgctgaacaggtgaattaggcttgtcccaggaaagacacaaggaaagacccaagcaaagatttcccaaatcgtgcccaaattctttattcctccgctacatttcaatgcacagatttccccatggaccacacgccaaacactccaggctgggaaactgcagggcaaaactcctatgaggcttggacactgcccgtaggctgccagggagaaaaggaatcccagagaatgtttttttgtttttttggttgttttcaccttatggaaaccaggaacagtctgttttcaaaagtcacagctctcgagagccctgcttgattggggtggtggcactagcattgctcagtctccaggataccaaagctaagcagctaaacagacaccagggtctcagagaaggaggaactcagaggaaaatgcatgcgtctgttggggacgggcctcccatgcccttggggacagaatgagtgaaataactaacacttgggagcctgcagagatctgtggcccccaacgttagccccaaatttcagagtattctaaataccatcctttaaaacacatttctttggtatatttcctattcttttaagttgaaaatgctcctggaattgttttaaccctgattcatgctaggatataaattacttaaactgcatttgtttgccagggctgctataactaagtatcacagacaaggtggctgaagcaacagacatttttcatctcacagttctggaggccgaagttcaaaatcaaagtgtccacagggttgtttccttctgaaggcttggagggaagaatctgtccccggcttctctcctggcttcgtggatggcatcttctccctgcgtctcttcacattgttttccttctatgcatgtctccatgtccaaattttcccattttgggccaggcagagtggctcatgcctgtaatctcagcactttgggaggctgacgtgggcggatcacagggtcaggagtttgagaccagcatggccaacatggtgaaaccctatctctactaaaaatacaaaaattagctgggcatggtggcgcacacctgtaatcacagctactcgggaggctgaggcaggagaatcacttgaacccaggagacggaggctgcagtgagccgagattgcaccactgcactctagcctgggtgacagagcaggactccatctcaaaaaaaaaaaaaaattcaacaaattttcccattttttaaagacacacttcatttggattagagcccaccctaatgacctcatttaacttgattcccactgtaaaagaccttctctccaaatgacatcacagtcaaagatactaggctgggggctaggactccaggacaagaattggactggaacacgattcaacccataacacttacccagtctttttcctggagacagaagttagacagagaaaggcttgaggagaaacagatcctgaatgtcagaaaagggcactgacagaaaaatctcagcagcccccagggagacagggagagggatgcacacttaccacagtgcccagggtggggttcagagcctggcccttgacctgtcttcatatggctattgcaatggggacaccaccatttccttctgcacctgaccttcatctctcaggtgaaatgagcaagctggccctctgcacctgcagaaggtggctttgcagaattgggaggtctgtttactgattccatttcccagagcactcagtccccctaataaccttttgccagatttaactccctccaaagcctaccgtgccacgaatgctgcctttgctcttgaattgccttgaaaatattttctagttgtgatgagggtaatctgtcacctttggtatagtctaagttcttttggtgtcagctgacctgagatctagtacctgttctatcacataccacccatatggcctggagcaaattgttacttcacctctctgtgcctcagtttcctcatctgtaggtggagataatggtaactcacagggttattgcaatgattagataacagcatttgtaaaacgtgtgcatttaacaaatggtggttattattaaccactttacaatggataactccaacggcttcctatgtgcacaacagataacaaatgttcctcaccacctattggtgtgtgatgcatatgtagacattcaaaaatggtcacccagtggttcgcatgttagctgggctgacccaaaatcagctccaaacgtcttgctcctcttcacagaacccaggcatccccccagtctctggctccatactcttcctctgatccccaaacatgctattctggatatgccagttccttgggctgctttaagggaaaaccctctaataaaggttgagaggtacagctggggtcagggtgggggcagggatcatgcatcagaacttagggacccctagttgtcaccctgagagttctgggggacttggatttctactgctccaaataatccctagctgtaaatattcagcaagaaaagcaaggtcctctgcccctggtctctggttgcttttgaaacccagcacctaggctaaagagttaacataacctcattgcagagggatttctctgtaatctgtacacatgtcccagggatcaggactgtgggaggtggtgctagtccgtggcagttgctcaggcccttggccctcagcccaccaagctcccaaagccctcttgttctagttgatttcaaatttaattaagaacaactgagcagaagccaaggtctctgcagggccgtcacccctgagcttggagagggccaaggagataagcatctcatcacaaaccagaaagctggaagggccatcaccttcacctgtgaaaacaaggcagcaatgaccaccaggatgctcagcaaagcctgtggatggtgcacggaggggcgatgagaacaccatcagagcagactcaactggagccacgtcccggccatcctcataggcaggcaggaggaggccccttgcttttccatgtcactctcaccctctctggccaaaaggactcacattgtgccctcaaattcattaagctgatagcccacatctgagaaggacttagccaaaaagagaaagaacagacagagaagagaaagaaaaggtgagcagaccagttggcctgagagatctgtcaagttggagcccaggaggggtagatgcctggagagatactggggtcactgagtagctagatggttgtccgatgtttctaaaagtctggcccactggcccccctaccacaacatcagagcagctccaaattctgggatgcttctctgtaatatagattcctagggctccacccagactgaggaaaagatcctctaagggggccaggaaattagcaatttaagacgttcttcaggtgattttgacaatgactttttaagactaggaccctctagaacagggattggcaaactacagtccatgggccaaatctggcccgcagcttgatttttgtaaataaagttttattggaacacatgcctgtttgcttatatattgtcaatggctgtgtttgcaatacaacggtggagttgagcaattatgaaaaagatagtatgaccctcaaaacctggcccattacagaaaatgcttgccaacccctggcctagagcagtgattctcgaccttagtagtatgttagaatcagctggggagttttcaacattgctgatgtgggctcacctcagtaagaaagtaagcataggcgtcgatgggttttgatgctcttaaggtctaggaaatgtctggggaaatcctgggctcttacagagctggtaacaatttagaatttcctcctgcctcttcctctgatggtaaataacttcaaaaggtatttatggttgatcttctatgaacatgatgttagagctaaacagggattcagacatacctgccttcagttgcaagaaatacaagtcacaagttttttccccttggattctaatgtccagctctgtccttagggagacatccttcacccggttccagcggtttcccagctctggctgaccaccgactggttgcatcagaatcacttgggggagcctcgtggaaatccagactccaggtcccatttcagaactatgaattcagttctccgagagcggggcccgtgggtgggttttgttaaggaggttccaggtggtcgttcagacatccaggcttgggagccactgctaggaggctctctggggcttggctggagaaaatcttgtttcaatcaggtggaaggctttttccagaagccagcccccaggcccagaggagtcatttttctcacttttgatgtaaacttggacagtagctgactttatgtccatctcttggctcccagtgaaatcggaccataataccatgatctctgttaaagttggggtgtgcgtgtatgtgtatgcttgtgtgtgtgtctgtgactgtgagagtgtgtatgtgggcaagtgtgtgcgtgtgtgtgagcatgtatatgagtgtgtgtacctgtgcatacacgtgtgtacatgcatgtttgagtgtgcttgtgtgtgtggacatgtgttaatgtatgtaactgtgttagcatgtgaatatgtgcatgtgtatttgagtgtgagagtgtatatgtaggtaaatgtgcaggtgtgggtgcatgtgagtgtgtgcatgtgtgtgaggatttaggtgtgtgtatatgtgtgtttgagtatgtgtgtgtgtgcatgtgggtgtatgaacttgttagcatgggtgttggtgtacgcatgtatgtatgagcatatgtgtatgtacatatgtatttgagtgtgactacgtgcatgtgtatttaagtgtgtgcattcgtgtgtgtcagtgtgtgggtgtgtgcgtgtgtttgaatgtgaatgtgcagatgtgggcatgtatgtttgagtgtgtttcagtgtgtgtgggtgtgtgcatgtatgagtatgtgtctttcagtgtgagtgtgtgggtgtgtgcatgtctgagtgtctttcagtgtgagtgtgtgggtgtgtgcatacatgagtgtgtgtttctgagtgtgtgggtgtgtgcatgtatatatctgtgtgtgtttctgtgtgagtgtgtgggtgtgtgcatgtctgtgtttgtgtttcagtgtgagtgtgtaggtgtgtgcatttaatgtttgtgtttcagtgtgagtgtgtgggtgtatttgtgtgtttcagtgtgagtgtgtgggtgtgtgcatgtatgtttgagtgtgtttcagtgtgtgtgggtgtgtgcatgtatgagtgtgtgtgggtgtgtgcatgtatgtttgagtgagtgtgtttctgtgtgagtgtgtgggtgtgtgcatgtatgagtgtgtgtgggtgtgtgcatgtatgtttgagtgagtgtgtttctgtgtgagtgtgtgggtgtgtgcatgtctgagtgcgtttgtctttcagtgtgagtgtgtgggtgtgtgcatgtttgtgtgtgtttcagtgtgagtgtgtgggtgtgtgcatatatgagtgtgtgcgtcttttggtgtgtgtgggtgtgtaaatgtatgttggagagtgtgtgggtgtgcgcgcgtgcataaaatcactccacaagagccagaccttgagctgaagcgctcagattttcagtggcccagccaggccaggcaggggtcgggggaggccagtaagtgccaaaggccccaagcaccaggaggtgcccacaccagggccacgcactgcaggcaggtcctggaccttccacagccctcaaatccctctgccacttacctgccctgtggcttagacaggtgctgccgccttcccaagcctcgggttcctcatccacctcagaataatgagtgtacccacgtgatgaaattttggatggggggaaaaagggaaaactaagataatgtttttaagtgtccagctcagtgcctggctactagcaactgctcacttgtttgtccttgcaccaaacatttagtgagaacttgctctgaatggattcttttctggggattggaaataaaacatggaacgaaaccccagaaaaatccccatcttcatagaatgtacgtgctaacagggatggggaggaggacaaaaataaacaaccaaggaagcatatggtaccttcagatggtgaccaacgccataaagaataacaaataggaccacagacaccacgtgaacccagagacatgagtgttggtcaccattcaaaagctgatgcagccagtggtgacgcctcccctgtggagggtttagctccttcaccccaggactccctaacttcctggggctcaagtatagttatttgtggttaaaagctgagcattctatcgtgagagttaggcaaagcaaaacaaaaacaaaacctaaaatgaaaacattttgagaaaaacaaacaaaactcctctacacgtttaccagagatttgtttctgccggcttcttggctgagagtgaatatttatctacatgcacaaaaagaactgggttggggggcagaggcacctgaagggggaccccgtttccagaggggcagctgccagctacagggatggctgggaccccgagcctgcctaggaggaatgcccttccagaacccaaaccttcatttttaggatgtaactctagatgcagaaaagactgagaaaccaagactggcagttttagccaaccgcgttcccaggggcagttttgtaatggaggaagaagattttgaaatacctcgctcttccagccagtgagaaataaatctccatttctggtcagaggctgagactcactggctcttggattcactcaggagagaaatccaccatctctcccctggcccatctcatctccacccagcaccaccagggaaatgactgttccctagctgcattcacccggctttgaaagatcctgcgaggctttgagaaggaaaatgctttatgctgactgtgctttctcagctatcatttgggctgtttcatgcaaactcagcccttaggcacgttttatgcctttatttcaattccactcatccccttaccaacacacacacacagacacacgtactagaagccaggatctaattagacaatgtcaataagagttctttaaaaactgctggacataaacaaagtgggattcactgttattattccccatcaaatcaacaggacattttcccccaaagccccacaaatacacacatcccagggcaaccgagcgttttggagaggtctcagtgggccatctgcatttactgacctcgttgtgaggaaaggacaggaaaaaacagacagcagggatataagattctcccacacaaatggacccccaagacactctgcattgtttcatcaatgactgtcacaccccttccttctctgggaccacaaggaagaccgaccagggatccatttgaatcttaacactaaagcagaagaggccacttgacatacgtttactaaacacccgctctatcccccgatgatactagataccagatgatacacaaacaaagaagccatactctcttctttctaggaatgcagagtccataaggataacagacgaacagatgctttttgtttgtttgttttgttttgagacagagtgtcgctctgtcacccagcctggagtgcagtggcacgatctcggctcactgcaacctccacctcccaggttcaagctattctcatgcctcagtctcctggtagctgggattacagacatgcaccaccatgcccagctaatttttgtactcttagtagagacggggtttcaccatgttggccagcctggtcttgaattcctgacctcaggtgatctgcctgccttggcctcccaaagtgctgggattacaggcgtgagccaccttgcccaccatagacatgtttttaaatgacagtaacatccaacctcctttccctgaccagtaagaccttatgtgatctgattctctacctccttttttgaacatatgctgtactccttttgcctcatttgctgtgttccagccacactagccttcttgctgtttctcaaatgtgctaagaatattcccacttcagggccatggcattttctgttccctctgtctggaatgttcttcccgcggacctgccagtggctttctctctacttcctgcaggctctgcttcctccagggaggctcttcagccgctctacctgagacagccctgtgttttctttatctatccttttaccctgttttgttttttttccatagcatatgtcactgtctaacatgatggtacaaatgtattatctgcctctctcactagagtcccactgagccctctccaaaatgctcagttgccctgggatgtgtgtatttgtggggctttgggggaaaatgtcctgttgatttgatggggaataataacagtgaatccccttggtgctcattggagcaccaatttggtttcttttgtttcctgctatatgcttaatgcctagcatataatgggtaaacaataaatatgtgttgaagaaatgaataaataaatgctataatgaaaacagaatgcagcagaatctatccaaaccactcccagcctgttacgtgagtatcccacttgaagcacctccgttcctggaaagtttcctttaagcacagttccaaggaccaaagtttatttctcagaggccatttattgtaagacttggagatgtgtttctctggaaaaagatgtttacaccactgtacactgaaatctcagaaaagtgctccaaatcatagaaatatacaatggcgattttctaaaatatgagctgcagaatttcaaacacttctatgtgaatgccctcttaataaagcaaaacagtgtcaagatgatacagtggaagtgaggcgggaatcagagcctcacccaccagggcctccttccctcctcaaaagctatcactaagacagatgaatgacacgaagactgtcactaagatgcccagccacctacagacatggtttacaaagcaaataccaaatcttcccaagaaaagccaggacaaatggaaataagtgagagtatatttgtctgttgacattaaagcttcaaagcctagagaaagtatcatcaccagcctctggcaaaaggcacccctcccagccatccccagcagcctactgcagaggcacaagcatctcttctggattggtcagagccagggtcaggacactgaggcacagttgccggctttaaaatatctgtgatgcaaaacaattttgatcaggggagagaaggaaatcatgcaagtgtgatgatccaaaatgcagcaggaaataagcaaaggaggagagtttatgagagtttatattggacaagtctagaaaaaaatgaaacagaacagcagtgtatttactgaatctggtggaacagggacgccataaagccaggttaagtatgtgcagttagggaccatgattccctgtatgcatgtctgggtcatctacgagctgcttcctgcttgctgtagcatcattctactccacacactgccactgggaaccctccatgggctggtggaagagatgtaagatgagaagacagaggatctcacagcttaccctcaactgcctcaacagcccaaagacacccgtcaagggagcagtcataataataacagcagcaattgtgatcgtagcaaacacccctcctccctgggccactgtaggggacaaaagctccccataaattgtaaagcaagttttagtcatctgtttatgcaaacactcattgcaggcctcctctgggccagactttgctcagcagtaactggacagacagaggctaggagcactggtgcagatcctagcaggaaatgcagacaatgcagagagagagaagtaagttgggtcgtacaaataaatatgagaaacaagagaacagggcaagggctggtggacagctggggttcaatgttgaatagaggggttggggaagctccctctaaggagggaacatttttgtttttgtttgttttgagacagtctcactctgtcatccagcctggagcgcagtggtgtgatctcggctcattgccacctccccctcccaggttcaagtaactcttctgcctcagcctcccaagtggctgggactacaggtgcacaccaccccacccagctaatttttgtatttttggtagagacagggttttgctgtgttggccagacttgtctggaactcccaacctcaggtgatctgcctgcctcagcttaccaaagtgttggaattacaggcaggaaccactgcacccaaccaggagagaacatttgagcagacacccacatgaagggccaaccatgagaccatctagaagaagaacgttccaggcagtgggaacaagaaatgcagaagtttgcagcagaggctcaggcaggtgaccatggggaagaatgaggtaatgagggacaaaacttccccaaccagggcaagacttgagactatgctcctccatgtgagttgggaagtagcaggatcacccagtaacatccgaaaagcgtcactctggcagatctcgaaggtagcattattgctgcatgcccagaaccactcgtagcagctcctgacctctgtgaatccagtggaaacaactcagactgaccacatagtggctctcccttggcctttgactcttccatctgttcattttttatcaacagattaactgcagagcaaagagaacagggaagttgcggcggtaccaccatttcccaccaggttatgctcctccacgtccctggtgaatttgcatgagataacagcagtaaggaatagtaaggaattcactgtaacagaacagaaaccacaggatgtcatagcaagagcgtcccaaagcaggaacatgttagggttagaggtaagatgttgaagcaaaaaggcggtgggtaataattacggtgcagacactgcttaaccaaatatgcttttccatgttcctgccgaggaatgcccgatgcaaaactatttgcatgctctcactgcacatgtcatctgcaaaacagcccagcacagttctggtttctctaggtgaggtgactctgctttccaggatagcagcaggattgttgctttgctccgggccttgtcgttggccatggaggagccagactgcaggctgtgatgtgcttgcctcaaggctggactatcagagcatcagagtgtgtctccgaatgtcaggaagaggaatcgggttgactgagaagggcggtgatttctgataggaggttcccagccaggcgcagtggctcacgcctgtaatcccagcacttcaggagaccaaggcgggtggatcacctgaggtcaggagttcaagcccagcctggccaacatggcaaaaccccacctctaccaagaatacaaaaattagccgggtgtggtgacatgcgcctgtaatctcagctacttgggaggctgaggcagcagaatcacttgaacctgggaggcggaggttgcagtgagccaagatcatgccattgcactccagcctgggcaacaagagtggaactccatctcaaaaaaaaaaaaagttcccattcacccttctatgctagacgagtgttgttgggttattattccttccaaacttaaaaaattatggggaatgttagagcccaaaaaacaggagctacaggctaggggttactaatcacagggcctggggttccctctgacagcaaggggaggtgattcagctgtgccttctcattgtctcactgtgtgggttgaattgtacacccccgccccccaaaaaaaaagatctatggaagtcccctattgactcaaaatgtgacttttttggaaagagggcctttacatggggtaaccaagttaaaattgggtcatatagatgggccctaatccatcagggctggtgtccttataaaaaagggaaatttggacactagacagacacacacagagggaagatgatgtaaagacaaagggaggaagccgttcacaagccaagaaacgcctgggtctcctcacagctaggcaagcagcctggggcagattcacccacacagccctcagaaggaaccaacccagctgacacttcattttccacttcaagcctccagaattgggagatgataaatttctgcttaagcgccccagtttatggtactgctgtttaagccctccctggaagtgaatacactcaccaataacagcttatactgaagggctgtctttagcgaatattagtgaaccctggtgtcctgcaggggacgttcgcagagttgaagatgtggataatttcacatggtttttgcaaggtgctgggctcccagcacatattctgcaacaagctctatgaacatggcctcctcccggattttccatgcttgctttgcattaagcaatagactgagacttggactatctcatttcaccccgaggaacaaaatgagttggatgtttacaccattttataggtgagaatacaaaggcattagttgttgtacagtagtcatgaaagatggctgaaaaatcaggtgcaaagagggtgtgccagggagcccccatgaggagggctctgctaacagacaggggagggccagggagccgtaagttcttctgagccaaggaaacccatcctggaggagaaagagatagacaggccagagttccaagcctggttctgcctcctgcagccatcaggccttggccatctccatgccagggtttctctataggaggagtatcggcaggggcgtccacacatggcaggacattccacccccctagcatccacccactccctgccagcagggcgctgcacttccccccaggcatcggggacttccacaatcaccccacacattccaaacaccccttagggggtggtgccctgtccaggtgggaacccctgaatcattgtgagtctcattaacttcactcctaaaatgagaaagacattatccttcctcctaggttatgagggacttgagatttttctcttttttttttttttttttttttttttttttgagatggagcctcgccctgtcacccaggctggtgtgcagtggcacgatctaggctcattgcaacctccgcctcctgggctcaagcgattctcctgcctcaatctcttgagtagctgggattacagacatggcaccactgcgcccagctaatttttgtatttttagtagagatggggtttcaccatgttgcccaggctggtcttgaactcctgacctcaggtgatccacccgccttggcctcccaaagtgctgggattacaggcgtgagccaccaagcccaggtgggacttgagattttaggtgtatagaaggcagcattttccaacctcagtgccattgacattttgccctggatggttctttgtcatgggggtcttgtcctgtgcatcgtatgacatttagcagcacctctagcctcttcccacgagatgtcaggagcacccctctcccaagtcatgacaagcaaaactgtctccagacatggccatatgtccccagttgagagctgctgataatagaataatattcagaacagtgtgaggcttgtagtagggactgaaggaattacagctcttattacaaaaacatccaacttccttctttttctactcagtaacaaccaccaatccaattcaggtaaataagaatgcaccactgagtccgtgcacactcccattaggtggggcagcccacaggctgtgtcatggattccaaggactgaacgtatgtatggccattgtcctcctcttgccaatttcaagggtccttggcagaagccttggccttatctgtgactgctccctctccagcaactctctgatccacctgtcaccaatccaattgttcattcctccatatactcttttctcttcatccccactgccaattccaaggcaaagcacccttcatcattcacccagagatcccagcaatttctaaagaaagctctggaccctaatctttcgtctctctccttcaatccttccacctcttcctgttggggcttcactccccggacaccactctcatcttccatataccaaggtcaagaactctcctgcctttcaagtgcctgatccccatcccctctcttgtggacagcctgactttctgctttctgcagtacgtaggcacgtgcctcctctcatccctcctctctcactgcatgctcagtgccttcagacatgcagagtatctctccaacctcctcccattcctccaatcccagtgcaagctcagcgtccctcctccaaagccttctttaactctccaaaccccactcatttcaccctttgctcaaattctattgcaattatggtcattcacacacagcagaacacttattgtttaaatgcagtattgcctttccaccccctggtatccttagatgaatgatgtttttatttccagagttctaaattcaaccttccctaccccacctcctactagatacctggcttacttcctccttctgttttttgtttaaatatcaccttcttagccaatcttctttgaccacgctatttaaaactgcagcccctccaccatccccaagttcctccatccccctcaccacctaagcaagtccttgttttcatggagcttacaggagccgacatatttgcctgggcagaaaatatattcactttaccacttatttcattcacagacagttcaatatcgaatctgttctcagtattttattatgactccttatcagtgtccttgatcttgactttaatctctaaggacaagaaccttctctgttttgtttttctaaaatgaactttgaagtttagcatgattttagatttatagaaaagctgtgaatttggtacagagaattcccatatatccaacacctagttcccctgttgtcaatatcttacatgaatatggtatatttgtcataattaatgaaaccaacattgatacattattattaaagaaagttcatacattattcagagtcccttagttttttttcttaatgtcctttttctattccaggatcccatcccacccaggataccacgttacatttacctgtcatgtctgcttaggctcttgttggctgtgacagttttcacacttgtttttcatgaccttccttgacagttttgaggagtactggtcaagtcttttgtacaatgtccctcaatttggatgtgtctgatgtctttctgattagacaggcgtaatgaattttgggagagaagatctcagaggtaaagtgccactcttatcatcttgtatcaatggtgcagataaaacatgacatcactgctgatactgaccttgatcacctggctgaactggtgtttcttgctttctccactgagcattacttgatttccagcattttcatactgtactctctgaaaggatgttactagatcctgcttccttgtgggcagagtatctacctaaattattttgaattcttctgcatgggagatttgtctactagctctcatttatttattgatccaatcatttctttatagcagtatggactcatgggtatttgttttatactttgggttataatctagttagctttattttcttattcaaattgttccagctttggccattgggagttctttccgttggtgccagtgttcctttgacccatccccatcattgtgtctgttagtttttgtaattttgtttgcttgtattttgagcatttccttacgttctggctctactgatgttccaggcttatcttggatatgtcctgccctacctctagaatcagctatttctccaaggagctctagttcttcttactgcagaatagtactagaaaacaagatctgggctctcagtgtgctcattgtgactagggtgtggttaattctaagcccttccagctgacaaagcaaggaaaggtatgtgcatatactagtccatgtctctccacacacatgtatttacaaatgtttctatatgtaatcatctgtatctctattaagctaaacataaacttatactgatatttttccaactctaatccattaccacatagatcatcctagactcctcccattgctgagctttaaagtcccactcccacagtgaaaaacaagcttcccaccattcaccatccatttacaggattgttcaattgcagtctatgtggatagcagtatcagaattgttgacccatacccccatggaaaacaaccttatcagctacagtagagtgcttgcgggcatttcctttgcatttagtcttacccccctcatttcaaagttgcttagatcagcaccttttcccaccaaccccttcagttagcttgcttcatacaactataatatatctagattattttgtcacattcttcattccactctgtgatctcccaatctcctaaacaatttgttaaattgcgtgcattaagattctcaatgtgccataaagttctattggttttgacaaacgcatagtgtcctgtatccaccattacggaatcaaacagaataattccattgcccttaaaaaatcccctgcacaacacctgttcaactccttccctccagaacctctggaaaccactgggttttttgctgtctatatttttgccttttccagaatatcatataaatagaatcacacagcatgtactcattcagaccagttcctctcacttagcaatatgtatttaagattcatccacgtttttgcatgacttgatagctcatgcctttgtgtcactgaatagtattccatcatatgtatgcatcaaagtgtcctgacccatttagctattgaaacacatcattgttgcttctagttttggataattatgaataaagctgccataaacactcatgtgtagaattttctgtggactacagtgttcaaatgagtgagataaatatctgggagcatggtttctggatagtacagaaaactgattagctttgaaagactatttgttttttagaaattttcagtactgagacacatgcaggtaaatatttaataaatagtttttttaatttattaaggacccaacagtcagctgcttagaagctcagttcctgggagagaagtttttagctttgagtaaaggaagggaacttcctggcatatgtcatctcactgccagaaacagagtcaggttgccccaccattgaactgtggatcagatggcatgtcttcttctgcacctacttgccttgcagttcagctatgccttgtggattctcagataatacatgttagaggaataataatgacgattaccactaagttgtcacttgatgttgaatgtgtggcccaagtgaaaactacattttcttcatttgatctattttcttgtattcccacttttagccattttcccaaatccaaacaatctggctgccacactcagagggggaagaagtcaacttttctgggaaaaaaaagacatttagagagcctgggcccatgtagagaatgtcagacttctccagaaggacatggccctgctcctgtccatgggagaacaaaggatccagtatgtaatggaccaaaaaggatgcaggctgtgtctatattcccttgctgacctcttccaattgaggccaaaacagtgggctttagacttgaacatccattagagtcacctaaagggcttgttaaaacccggactcttgggacccgtccccgagatgtcttattcacccaagagtttgcatttacaacaagttccccagtgatgcaaatcccactggtcctgccccattcttggagctccacctgcctagagaactaactatccttcatacatccaaacccatggccatcgctagatctcccctctactcctcatgtaagagacgaagctgaatggaagagcttgggaaggtggatctgagatttggggaagaagggccaaggggtctaggcactgactctggaaacgcaagttgttcgccactctggagatgctcactagtgtggaaatgcaggcttttggagacggaatgggctgtagtggccaaattccctttaccataaaaagaaagaacataaacccagagggtggaagccatgctctcaaggccgcacagcaagcctgggcagagccatagtgacctagaccttttgactcttcccataatagtaaagctacccttccttgttcaaggcagcacaagtaccttctgactcagagtgaggagggcaggatcaagcccattcctggaacgacaatatttgaattatcatctcaaggggaaatgaacaaagaatagcagttccctcaatccactccctgctaaacacacacacacacacacacacacacacacacacacacgggttcacaaaggccagctctccaaagagtcagggagtaggaaatgggcaagtgggaagatgaaagctcattgtttttgcagcaacactagtcagagtaataattcaattttgaccacacagaataaacagttccaagcatctagaagatgagactgctgaaattctcagctgaaaacccaaggggacagaaaaaccagagctgtactttcagttcctcccccaaaataaaaggactccagccagccacatctcgcccttagaaccctggaaacaggtgagcgattcatgacatttgtttaagatgaatcaattcccagcaccatgtagtgagcctaggtctcagaatgacccaaaaggaggggcgcaagacaagcacaggaagggggatgggagagaagagtctttgtctgcttttcctgatattttaaatattattagataatttctttcaaatttctaataagcaggttgaagtttaaattacaagatctctaacagagtcaggatccaaatagcacaggagccggcagacaacaattgctggggccggatgggtttcaggtttgctctttgtgaagacaaagctcctattgagtggtggagaggagagctggggaaaagagagagggctgtggagggttttcattaccccgatcatcatccccaccgcgaggggaggatgtagaaggaagaaagaaaatctggacctggccaatgcactgctgaaaatgacagcttggaatgaatcacacacctgatatctgtggctcctccagagcagagtgtggacatgagacaaagaggaggaaagaaggaaggaagctgaagctctagtcctgcacgctcatgcatccagcaaaaataaaaaagcaaaaacatcagagcagaggatgggttcttggtaggtggtccagggctagaaaggtgatctaatagttttctgttttttcttgagatgccttgtaaacactagattaggaacctcaacactcaagggaactttatagttgaaaaccaacagccacttcccaatagaaggtgaagcagagatggcagagatcaagagatacaatacctctccctctatgtgtaggctaacaacggagatcacgggtctctggggcattgccacaaacccaatcttgtttgttcctcttcctctccttccctcatttcttttccctctgtcattattaatgtcagagtcaagtgccctctttgaaaaaagcaagtctccatctgaatggagttggggccaggttcacagaagttatttcttattggaatgttctccctggcaggtgcttctcatctgctaacccctgtgtcttcccttctactgcactggcattaggaattagtatctccattcagatatggccaaatagcatctgagaggtgaagccagtagctctcaaactgggctgcaaaaaagttgtttttgtttttggatgcccattctctacactccagagattctgatataattggtctatgtttttaaaattcaccccaagtgacccttacatgtcagcagaactgagaccccttacattaagaattatccaaggagtggttctcaaacacctggaaggctcatgaaacatagatttctggacacacctgcagagtggctgattcagtgagtctaaaggtgggtcacagagtttacattttcagcaagctctcaggtgatactcaggtggctcccagggaccacactgttagaaccactgaccccaaagcatatatgttgtaattggtaaataagatgcaatgtgggcctccctgcctcgaagtctgcaccccaagcatgtttgtatttcccttttatttttatttatttatttagagatggagtttcgctcttgttgcccaagctggagtgcactggcatgatctccactcactgcaacgtctgcctcctggattcaagcaattctcctgcctcaccctcccgtgtaggggattacaggcatgggccaccgcacctggcaaattttgtttgtttgtttgtttttggttttttgtttttgtatttttagtagaaatggggtttcaccatgttagccaagctggtctcgaactcctgaactcaggtgatcacctgcctcggcctcccaaagtgttgagattacaggtgtaagccaccacatctggcctatttttgtttattttttgagacaaagtttcactcctgttgtccaggctggagtgcaatggcacaatcccggctcactgcaacctctgcctcctgggttcaagtgattctcctgcctcagcctcccgagtagctgggattacaggcatctgccaccatgccctactaactttttatacttttagtagagacgggatttcaccatgttggccaggccggtctcaaactcctgactttcaggtgatacactagcctcggcctcccaaagtgctgggattacaggcgggagccaccacactgggcccgtatttcccttttaaagtggtctattggaccaaaagaatctctagacacaatgactactgtggaggagctgtagaatctctctcctgagagatgtgtcagatagcatgggagacaatattccagggcattgcggctcaacgggcgctctgtggaccaggagtattggcatcacctggaaactcattagaggtggagtctctcaagccccaccccagagccaggactggaatctacatttttagaaggtttccaggggattttatacacatgaaagtttaagcaatgctgttctaggagagctgagaaacaccatgattggaggatggagagattaggggtgtgtgcccagcacacctacaggaggtagggggcagggagctgcagctcatctaggtccttctaaaccctggcaaatactggcagcgtcaggaagggtgttcaaagagggcactcgaccatgatgataatgacaaagagaaaagaaataagggaggaagagggagagaaacgagatccaggtggcaatgtcccagggagttcaggtctaatgactggattcaatgatgtctagagtgtgttcagccctggcactgccactcagcccaaaagcagaggaaggaggggaaagttgtgggctggcctctgagcaacccatgttgctgtcacttaagcctcaccagatccctatcagggatggccatgcctggtgtattagtctgttcccacattgctataaggaaatacctgatactgggtaatttataaagagaagaggtttaattggcccacagttcgacaggcagtgcaggaagcatgatgctggcatctgcttggcttcaggggtggcctcaggaaacttatgattatggtggaaagcaaagggggagcaaacatttgatatggccagagcaggaggaagacagagcgaggagggaggtgctacacatttttaaacaaccagatcatacaaaaactcactcagtatcacgagaacagcaccgcaggcatggtgttaaaccattcatgagaactccacccccacgatccaatcacctcccaccaggccccacctccaacaacagggattacaatttaacatgtgattggggcagggacacagatccaaaccgtatcacctggtttccaaggagaagtcaagataaggaagatcagaggacctgtgcaggtctcacagttactcaaaaaaacaaaaacaaaaaaacccaggggatttcttatccaggtctgggaagccaaagctcacattctcctcaccacaaaatgtgagggataggttcatgggagatgattacaggagcaccgtaatttgggagtttcagaggattcccaaattctgtcttgtcttttgcccaacagagtaaccaagccactctgaatggatgtaggagacagagctttgggattacacacaggggctctggactctagtcgcctgaattgaagccctgtctcaactctttgctagcttcaggctcccgtctatagattctctttgtctccgcttccttgcctgcagaagatggagaagaaactgatatccacctcactgaaattttccaagaattaaatcagataaaacattcaaagttctaagccccgtgcctggtagtctctttggaagaagtaccagtccctagtcttggtccggtcaaataatctctctaattgctgctctggaaaggagcattttaattccacagtgggacaatgtggagaagtggaatgctatgggaaatgtgggtacaaaatgggaggcgaagggcggatgaagcccagttatttatgtgattgcaggatgtttgcaaagacacactcaaaatgcacacaagttggcgtttccccacaagtgatggcagtgagcctgggaagggtaatgtcgacatcagaaccatctggctgtgcctgcaaattcagaagccaatcaccattcccaccctctgaactctcaccaccccagtcctacatttttataccagagaccctgagccccctggaaggggaaatagtctctgtcccatttgctgcccataaataataccctgcaagagtgctcactttagtaccttatcttgctttgcagttaccttaagtgcaaaagacaggcttggagaagagaagcacgagctgaaaacctgcaaacttctgtgctcccctgggctcaaaggtctacagaaggaagatttgtttttaaaatacttccctgttcaggaagggtagtaattgtgatcatcagaggcaccttggtgtgtcctaggctttcattcctggggttcacaggaatccacgtagagttccccttcctgctcaactgctgccctcaagagccagctagccttgctcaggtcattgcaaaacctgataaactaggtgccattattattactatttacaggtgagaaaactgagtcttaaagagtttcacctatgtgctcaaggtggtacctatagtaagtgattgaggaccaggaagcatggtcttccagagcctgggttttagctgccaggccaaccttcatccatggtggtgcagggggactatcattgaggtggggactcaccagacctgtgtggacatcttggttttgatgttcacctttcttctggtaccactgtccccatttttctctggaagacccagtatcagtcttgccccggagggcacctgactcatgcctggccagtcagcacatccctcaggctgtagggattggttcatgaatgggcacatggctagagaggtggctcattctgctggacatggggctgtgagcccaggagcccggagggagaacctgcttgagaattaaaccaatgctgagaagagcaaaacccagagatgttgtgtcaggtaggaaggccatgctaagctgaggtaacaaataaacacaattattgttgttatttattattgtgtagcttaacataataaaggtttatttccccctcacataaagtccaatgtgggtcagatgattttccagggcaactgtcttcttctagtccataacttgggggttcaggtgctctccatcctgtaatggggccatctcaacatgtggctttcagagttcctgaagtaggaaatagagacataatacactcattttattggtcagaagttgtcatgtgactcacctaaactcaaaggggcagggaaatatggctgtccaatgtggcgcagaaggtaagaactactcaagaatgaaccccgaaagtctccaccacagatggagggaaataaagtagtttaaatgattcaacatgatttagatctctggatcaagctgtgcctgaaggagttgcagtagttcttaaatgagccaatagatttcttttttaaaagtctagtttaagtttagttttcttctcacttgcaattgaacaaatcccacttgacaggaacatacctagacctcactccctggctggctccagcatctccctcctcccagtcgaaacaccacccactatgggcttctgcccttccactcactaagaactgcaacacacgcaagcttaaatgttctagattttcctaggaactgtcttttcagccactgtgaaggccaaatggtacatgagagaggaagtcacttaggagaaaataaaagtcaatgctaaaaatagccttccatcttgcaaatgaatggggttcccctgaaggaaagataggacttctgtaaaacgccataaagttagctctctgagatcctttggagaaagtggccacatctgtccttagattagcagcagcagcaagagttggcttgacctcctagggactttgcttgaagactctggctggagagaggagatctgggttctggtttaatctttgccattgaccaactggctaaccttgagcaagtcatttatcctctctgggcctcagtttcctcatctgtaaagtgagtatgttaaagtagccagggtctaatttccctgtctcccttatgccctagatttctataagatcccacctccacctgcaggtgctcagaatgtggctcagcaattgtcctgctggtcacaaccagcaggagtgagtgtgctggttgaaacccctcccagaacttcccatgaagagtggctgcacactctgtgtactagctgggtagaccactgccaaaatcatattcgaagaacattggactgggagccaggagacctaagttcacataccacttgtttcattgcctttgacaagtcctttaaatctctctagacttaagtttctccatctttcatgttggaatggtgatttgtgcttccatcagaagatcaaacaaccttctagaggctgctttgggcttagagtcatgtgacatggtttgagttatcactctgacatcttctagctatgagaccttgagcaagttgtaatctccccacaccttaaggtctgtaaataaaaatagcaaccattaacttaattgagggctttctctgtgtttccctacaacctcatgaggtaggtactattatcaactgtatgtttcaatgtcctttaacctctctaagctgcagagtcacagagcaggtggcagacccacattccaatccagagctgtctggccctagtccctgttccacaccaccctccctgcttccctgacatggacagtgaatgaggatgggtacagggaagccccaaatgctacagaggtgtctcattcaggtctgtatcatccttcctccctagaaacataattaaaatgtagtatagtctcagaggccttgtgatgaatgagtgattaacgggtgcttagatggataacaaaatagataagttataaatggaaaacaatgtggcgctgtgtagatgcccaaatgtatgtgttgacccaggtaccatcacagtcattccatgggagtaacagggatatggtgatcaggtgcgcttgcggttgggatatggaagcggccatgttgaaggggcccagactaccacacaccagaggggctggggtttcttcctctattcctccaccagtggcccagaaggtccagacatgtgcccagggtaagaaagtcatctaattagagctctgatgctaaatcgcatgagggccttccctggagctcaggatagagggctgggaatgaggcaagcagagctggagaaaaagggctgcccacccatcactcagccgtctgggtcccatgcccgaagtgaaggggacgcctcagatctttcaggaaatgtcagcagccaaaacaatgtcttccttgtcttccttcttgttttttcactccttctgcatgcccctgtggcccaggaatatatagatccatccatccaattttgagtacctgctatgtgccagacactgctcaaagggtttgggatatccttaaataaaaacacccaaaaatccctgcccaggttcaccttgtgtctgatcacaagagcaaaccctgcccagccactgccagaattggtatcatggggcatcctctgcactgaccatctgattatcttgccctgaacaaagggtcagagctatgtctaaatgctgggatgggtcctacaatgaactcacatctctggagaagaccttcaacattggagaaccagctggtgccttcttctaaaagaaaggcaaaggtcttggacttcgtagttccttgcaaatcccagtctaagccattcagtagcaggaaatatgtgtacctggagaggtctcctgcatgggtctgtgaaaagaaggaggcaggttgatagccaccagttgtccaaatgaattcactcaatgataatgctgggcactgattaagtctatggccccttgctagatgctgagacagccactgaataaatgagaggcagttcctaccctccatgaacttccaaatgagctgacaatcggatgggctgaagaggttaggaaatctgtttggttaggggtaaatagagggataggataggcagagggaaaaaccaggaccaggttggatgtaatactgagaacatgcacagcccaggtatagcagcagggagcttatattaattcactcactcattcatctattcagtcaataaatatttgttccatacctcttctatcccactctgctaagctctgcaaataacttggtgagcacatccacatcatttcttttctaagctgatggtcccagtgggagagacaggcattcatcaaataatcacacattatttctttgaaggaaaaatacaagacatatcaaaagaactatgtatgttgttgtgtgtgtatgcatgcatgcacacatgtggtggttagaagctggtggtaaggagacagtttctgcaaaggtaacaacttttgcaagatgtcctgagataggtagggatctagtccagtaggtgggctgaagagaagcaaactagaggtgagagcaggaatcagcaaagcccaggctgatggtacaggtcaagttgaaggttttgctctcatcctaaggaaagggcagccaacaaaaggtttatgcagcaaacaactaggctgtgatttgtgctggagagaagatgtcatgctgaggagttaggagatgaattcacatttccttcattttatgaagaatttacaaaacctttgagccaaaaaagttcattttctgttctctcagaggcagtatagcaaaatggttatgaatccaggattttagggtgaagatttcaatcctactttggataattaataataaattagttctaagccccatgtttctcatagggcttttgtgagcatttaaatgcaaacgtatgtaaacgtgagcagtatctctagcacttacaagcacccaacaatttacaactatttttcttggttctccttgcaccttgagtaaagagatgctgagctgcatcataagtttcagtagggtttgaccactcttaggaccatctttcactgagggacctttggcctattgctttcttgctgaagtttaaatgtttccagtttctttttgagaacagctggtcccaatctactaaataacccctttgcacacttgaagaccattattaagattccctttggccataaacatacgaagaagtgtttaacatatgaaaaaaatgtttaacctcaccagtaatcaaagaaattcaaatcaaaacaacaaaatgcaatttttgcctatcaatttggtaactttttaaaatgatagtgcacagtgctggtgagagtagggtaaggtggcaatttcgtacattgctggtgggaacataaattggtacaatctttctggaaagcaatttggcaatatgttatcaagaccctgaaaattgtccttaccctttcacccagtaattccacttctgggaatctatctcaaggaaataatcaaagaatcagacaaaaatttctgttcatgctgtttgatatagcaaacaatattttgaattaggaataaccaaaaactacctagaagtcaaatggtgtcgtgacatatattacggtgtcgtgacatatattaaaaagttattaaaagtcctgttaacaaggaattttcaaggacatttaaaatggtcaccaaaaactgtaaaacacaaacatatagaagatacaaaactaaacacagtaggattttaattatgtaattatatatacttatatttttatatgtgcatagaaacagctacatgcaaacacagcaaaatattgacagttcttactagagggtgatagaattaggggtggctctttattttctactttacaattatataaccaaaaaacttgtttaagagctcacatggccttatgtatttttctaagtagttcatcatggtccctgttctgccatagcatcttgcccagaatcgaaacagcggactttcagtggttacaatttacctggaaagggccagatagcagatattttaggctttgcagatcatacagtctttgttgcaacttctcagctctattgttgtatggcaaaaccagccatagataatatggaaacaaatgggcatggctgtgttctaatagaattatatatatataattatatatataattatatagatataactatatatataattatatatatagttatatatatttatatatataattttatatatatatgcagcaagtcagttttagcccatggccttagtttgccaacacctagtctagatgatttgaatctctcctggcccaaattatgtatagtctcaaacaagtatagttggggaaacttctagaagggtggggtgaagtaaggttcttgtctccatattcctagtgagtcaatccttctgaaatgtattgagaagcagtcagccagggcacttctcacaggcttttattcgcctctttggtttttttctttctttctttttgtttttattatttcaatagttttggggatataggtggcttttggttacacggataagtcctttagtggtgatttctgagattttagtgcacccctcatccaagcagtgtacccaacatgcagtattttatccctaatcccctcccaaccttatccccacccaagtccccaaagtccatgatatcactcatgcctttgcatcctcatagcttaggtcccacttataaatgagaacgtacaatatttggttttccattcctgagttacttcacatagaataatggcctccgactctatccaagttgctgcaaaagacattatttcattcccgtgtgcctaagataagaggatctttgggtccaggagttctgggccgaccagacatctgcactaaattcaccatcaacatgatcaatatagtgacctcctgagagcacgaggccaccaggttgcctcaggaggggtgaaccggccccggtcagaaaccaaacaggccaaaactcccaggctgatcagtattcgcctctttgcatgggtcttccctcttcttgctcatcagtgtcccctccaagtccttcctttgctaccacccactgcagcccttatcccatctgacataataggaggtgaagaaagccaaacaccccagtgatgactgaaaggggctgcagagacttggaacagttggtggctagtttgagatatcccttctctaccaacagtgtggtaaatgcacatgatagcaataacttaagcataccgagaacaaggctgtatggccgatgcacctgactgtgttttcagagttccaagctaaggaatctgggaggagccaatgcagagattcgttttttatctatgaggaacatctgaatgcccagcccttcctgcagaacatgggccatgcagggatcgaggccctttgtttgggggttcagtaaatgttgccaggtggagactgtcaggggaagggtgctaagtgaaaatgttacataaactgcacgttctttgcaagcagctcctgcccagcccaccaccactggactctcttccctgtatgtaagtccctagcccatgtctcatctgctggttctgggtctcgtctccagcctcttcaacctggtgccatccccactggagttgacaggggttcagcacaataccaacaatgaggtttccagattcctgggtttgtggctccatcttccttctggccactgtgttccagaggaggagaaggagagagacaaaggatgaactgtaagtgtgctgcatcccaggcattgctccgaggggtccataagatggttttttggtggggaaagttttatattatagagacaaatagaaccctcacagcaaggacgcaccataaacttatgtaaacatataagtatatgtgtatgatacaaagttttgaaagttctcttgttgagagtggagtcttatatcactcactttaacatatgcacatgtcggccaggcgcggtggctcacacctgtaatcctagcactttgggaggccgaggtgggcagatcacgaggtcaggagatcgagaccatcccggctcatacagtgaaaccccgtctctactaaaattacaaaaaaattagcctggcatggtggcgggcgcctgtagtcccagctactcgggaggctgaggcaggagaatggcatgaacctgggaggtggagcttgcagtgagtggagattgcgccactgcactccagcctgggcagcagagtgagactctatcttaaaaaaatatatatatatacacacatatacatatatatgtgtgtgtatatatatatatgtatatatgtatgtgtatatatatatatgcatatgtgtgtatatatacatatatatatatgcacaggtcattacccagtataggtagggagcctttctaccttctccaccttccctttcctgctccaattctttttgtatgtttccagtagagtccccttgtttaaaccattttagacattgaggccttgtccaggaggcagaaatgacatctcagagcagcccacatatcaggtggtgagtgagagagttataggatgacagtggcattccaaaggcgtctacttccttgtcacttttccctacaaacacctcaaatacaaagttgagaaccaccaagtgaaaatggcccacgtggcaagacaagtcactcatccaggggtcctcccaatgacctcttctggcttttgggtttgattcccctgactggtttgatcttactatcatactttctattgcacccaagaggcaggcgctggcattattcaactttccttagagacccagccatcctgttaaacagtgatgaggaaagagaagagaacaaggagactttgcattttaaaaattaaaagctccaataggtcattttgcttaaaaggaaatctctcggccgggcgcagtggctcacgcctgtaatcccagcactttgggaggctgaggtgggcgggtcacgagttcaggagatcaagaccatcctggctaacatggtgaaaccccatctctactaaaaatacaaaaaattagccaggcgtggtggcgggcgcctgtagtcccagctactcgggagactgaggcaggagaatggcgtgaacctgggaggcagaccttgcagtgagccaagatagcgccactgtactcgggcctgggcgaaagagcgagactccgtctcaaaaaaaaaaaaaaaaaaaaggaaagctctctcacaccataaccaaggcagaaaacatttgtacccaacgctcacatctacctacaatctctgttaggcggttgctctgtgacttacttttctgctcaatattgacttcaatggatattttactctaatttcctctgcatagaaatgtttggtgattgtcttgctggaggaagggtacattgagagcccattgtgaatctcactgtccataccatctttctatgaaatcttgttcaataaacaatcattaggggcaacatggtggacaggaaggccataggattagaagtcattcatgctcccacatggtaggcattttctctgtagaagacaagactcagtttgaaaagcatttctgtcactccccaactatgtggattacttcatctctccaggcttatcttccttctatttgaaggaagaaaggatggccaggcgcagtggctcacgcctgtaatcccagcactttgggaggctgaggtgggcagattacctgaggtcaggagttcgagaccagcctgactgacatggtgaaactccgtctctactaaaaataaacaaattagccgggttttgtggcagatgtctgtaatcccagctactcaggaggctgaggcaggagaatcgcttgaacctgggaggcagaggttgcagtgagccgagatcacaccaatgcactccagcctaggcgacagagtgagactctgtcccaaaaaataaaaaataaaaaagagaaaggaacagggtgggagtgggaggcatatatatgatctccatcatgcagggctgtgaagctggaacaggggctatgtgatcacctgtcacagggaaggtgcttagaacattccatccgcacttcattcttgaagcaagaaaccatgctaatagctctcagagttgcagagaaggatgttacccagccctgtcccccaagtgctgagtcttcagggaaaacatttgtgtacacaggtaattcagaatattgggcacattgtgaaaggtgctgccagaacaaagaggaagaaattcatccaaacagccagtattagtaaaggcttcagggaggaggtggcatttgagctgagccttgaaggacaaggatggagaaacagccagggcttccgggagggaaccatgagagcacaggctgaagacaggaggggacaagcatttcaggaaatgatgaagcattaaggacagtcaggtgcagacagagcccagaatgagtgaggcttaaagaactgaaggaggccagatcatgacagagccacagatgcagtgctgagattgcatggtttcttttttgttttgttttgttttgactcagagcctcgttctgtcgcccaggcaggagtggtgcaaccatagctcactgcagcctccacctcctgggctcaagccatcctcctgcctcagccttctgagtatctaggagtataggtatgtaccaacatgccgggataagcttttttatttttatagagacagaggtctcactatattgcccaggctggtctcaaactcctggcctcaaacgatcctcctgcctcagcctcccaaatcactgagattacaaatatgagcaagattacatgttatcatgggggaggggcgcataagattctcagaccaggaaattacgtaatcagaacatcattttaacacagtgaacacacatctctgtctgcccaggataatccactggcataattatcaatggaacccccattcactcataaaagcactttcctttagatgaagaattacatgatcactctcagtttagatcaccctgctgtccatgggacacagaaaccaggggcaaaaggaggctggaccagagagccattcagaggccatatcaactatccaagcaggaggtagggacttccaaaggcagagaactcatgggaaggcaaagtactagatcaaagtaccaatttgaaggcagattcaacaagaccgattgattaccagacgagtgatggagaaagaaataagcagacccactagatgactgacagtttagtatcagatatggggactggacaggctgagcaggacattcttgtgtaagagggcaaggagctggcaatgaaaatctggagcacagaagaggccagagctggagatgtggatttggcagatggcagaatcctggggacaatcatggctgaagagggagggtgtgagaccacccagggagagggtcaaaaagatgacagtgagggtacactgagatgatactgagacttgtgcaaaagaaaagaagattcagggagaaacaggctcatggacacctgtggagaagaaggtttggggatgactgccaggatcaacagagccagacgctcctgcaggagtgagtaggttggaagaggacaatgggaaagacctttgaaagttccattgcaccagaacagtggggcagaggcaaattcagtgggttgaagagggagtgggaggtaaggaagtggtgtcaataagtacagatgattctttggataaatctgttagtgaaaagaaggaaagagatgagactgtggtttgagggaataatttttttaaaaaagagggggcagggaagcatttgggaagttaaatgtggaagttgaacatatttgaacaccgagaggaagacagtggcaagaagagggggtgtgaagttgccagagataaccatttggaataaggtaggaacagatggcttctgctccagtggagaggccatccttagacaagaggtaggactctggaaggaagcgaggctgcacttggagggagtgaatgctgcaggtggtggtgcctatagtagtagtattataacatcattagtagtaacaatgaatggttaaccttactttttgtttacatgcaagttctctgcattgtttaatcctcacaacagccccattttatatgtgagaaaactgagcccaagagaggttaattaagttgctcataaaccactgtaaaaatgccagaaggtggattgaaatccaggtctttccaatggcatagccagacttgtgggccacttggagtcagtatagaccaatggctcagtcctctcagtgagctggaggtgaagtcatcttctgtgaatgatgggggtggatgtggaggcctgaggaaggaggagaagagtcgaaacagctgctgggaagaatgcagtagggatgagccagagaaaagagagggcacggacagcttcccaggggtactgatagtagattccatctcgttcttatcaccctcattcccagccccatttcctaccaggggcatgcaccccatactcttctcatttattttgtgtcttctctcctctaatccctccatcaaaggaaataagagccatgtgctcaagtggaatgggtcagattcttcccactgctggaggacttggtgatggccagtgggtagagctggggaggtggtcctcagggcctttgtcccaccaagaacacccttggcctgaaaggcttagggaagcaaggcattcaccaggcaacagggattgcagatggagtgtctgggagctgtgcctctgcgtttagagggccagcgttgctgtttctgcctgggcccagccaatagcagaagagagctggagccaaagcacttgtcccaggtgaaccagccatcttctattccattaacaagcctgttcatcccgtgcgacctctttctaccagagatctattaattttagctaacaatcagtgaagaggacaccatttgatcccagagcttaaacccatacttcttattcactggtttgaccactttgaaaatagtagcaggatcaaataggctgagcctccctctttggacagaacttcattgaattgtaaatggaaggtgttagccttggagacaagcttaaagatatggtattactgcttgttggatgtggaccaccacttataaaaacctactaagccactggtcaaattgatagaatccatacagtaccagaatctagaaaacatggggctcaactcaaatttccataaaagtggccaacaggaccagggaatcggcattgaattctcaatgtgtgctgactttcagcctccaaatgtcatggtcaacacatggggtctcaggataggacatctgtgggctggcaggttcctgaagcgtttattggaattttcttgggactcttttccacagtgctagaaactgaattgtaagaaagtaatcacaatgaattcttaataattgagaaaaagcacggggaaaatgatcacatctgttcagactaaaatggaatcgtttcagggaatgcaagccgacaacgctcaatctacatttaaggcgactgtatttgtaagattggggacaaggaagaggggagaagcagctcttgagagagagagtcctaaatctgtatattcagaatccatgggtgaatgtttgggaagcagtgatttgtgtgtgtatgtgtgtgtgtgtgtgtgtgtgtgtatacacacgcacacatataagcacacacattctcacacactcgaacccacacactccaggtttctgaagagctgtataccattacccagttcgagttgaaatgaaccccgtgcctccctgtagcccctgttttgagttgtattctcctatcatgggcaggagagtctcctgcaaaccctggccacggcgtcctcagtccaactctccaacagattaccatctttcccttaagttgccctgaaaagcagcccaggggcaacaaatccctccctcttccaccagttccaacatttctctaatgaatgcaggagaaaattaattacagagagattttcaagacctcggcatctaatgaccagccccagcgccccctctctccagttcctcattggccctgcccagccctgccctccttccctccaccctcccctcccctcccttcccagaacccaggaacaataccgcaggctaattaggcagggaaagagtttcttggcaaaaggggctgagtgctaggtcactaccttgaacaacccagaagaaaaacaaaacagcattaaaagaaaaagaaagggagggggacctgttaatctcaagtgcatttccgccaaatactctccttttcaagtgttttcttcctggtaaacaaagttctgtggctggctttggagattttaggacgcggttgcttagtaatattggggaaaacacgaagtccccacctcagccccattttgtgcctcctctccctcggtcactgcactgaggggtggtgacacattcccacattgcaagggacagcccatttgtgaagaagagctgagctttcttttcttttcttcttttcatgtctcacagcttcccgaagcccagcaaagaacagagatttctgctcccaagtttggtgaatctagaccagcgctgtccagcagaactcgctgtgatgatggaactgtcccatatctgtgctgtccaatatggtggtcaccagccacacggggccactgggcacttgaaatatggtttgcacaaatgagcaactgagtgttaaatgttatttcatgttgattaatggaaattgaaatagccacagagagcttgtggcttggagagccacagctcctgtcaaaacctctgtgggctgagggcaaccaagggcacagtagtagcatctgggtggctcggtgacatttatgagggacagaggatgggatggtataaggagcacaaacaaaggtcctgatttcactacagccctatcttctcttttctgtgcccttgggcatcacttaaattgatcctcagtcccctcttctgtaacgttagagacaatcacaagagtgcacttcactgttgttttgaggcaagggcaatggatgccgagtcccctagtgacctcttccaccagagaataacaaatacaggcagacctggtgctctgccttcctgcctactctccagtctcatctcctgctcttccttggctggcgttttttgctcccagaattccatgcactttcaactttggtatctttgcctatgtcatgccttctgcctggaatccctgcccttctggttgccttgccttggccaagaaaattcctgatcaatctcaagggacctaaagaatagggaatcttctgagctctgagctagaaagcctgtttcccctctcctgtcatcccatcttcctcctcctgtcatcccatcttcccctctgcagtcatcccatcttcccccctcctgtcatcccatcttcccctctcctgtcatcccatcttcccccttcctgtcatcccatcttccccctcttctgtcatcccatcttcccctctcttgttataccatgttcccctctcgtcatctctctttttttctctctttctctccccttctctttccattatggctgccactagctgcacatggcaactgagcatttgaagtgtcgctggtacaaccgagcactgaatttttaattcgagtttacttcattgaagttgaaatagccacatatggcaagctcttgcttgctcacttcctcgctctcttgcacgcacacacaccccacatgctgtagctgggctacacactcctctccaaccccatccctctgaacatgtgtgcccctgaacttacctacaatctagtattgaagcaacctcttaataaatctaccatcccatgagaaagcgagcaattagaaaagacacagcctgtgttccactgttttgttttgtttttcatctatgtcccagcattcagtacagcatccagtacatagtaacttctcaatgaatatttcccatccatgaaacagaaattgttcatcagtctacagcctatatcatgggtcagcaaactacggcccacaggccaaatccagcccactgcccacttttgcatggccctctaactaaaaagcgttcttttattttaaaatgattatataagtacctccctaatagccttaactttgcctcttggcctacaaagcctaggatttttttgcttcctggccctttaagaaaaagtttgccaatctctggtctggatcccaagaacagctgctaatagggcttggtgtagcctgtggttagagaaagggataaatgaggtctggggaggggtgtggagagaagggcccacacctgggacagtcctagcaaagctgagcccacaggtacctggctaagtctgcaagagctggtcctcagggacactgccagccagggcagcacagacaggcacacctcgtgcttcctcctccctcttgagccatggcaaatggaagatgggattttctggattgtgttttgtggtttgactgcgtaaagtagcagtttccattcaaaacaaagcccctaagcatatttttaacagcaatggcaaggtcttccaaagagacatgcataggggcttggaagcaatctggcaggcaggaagcagtctgtccttccctttcctgctaaaacatgaaccgaggtttctaagaaccaaagcaaagattgctccaggccctgacaacaccacatcaaggtgagcaacaagatcctgaaaggttaccccatctctgtcctatgctcctcaataccctctatacctggcctgtgtcttcctaatctccaccccagaaacaaatcgtcaatcatctctccaaacatcacaagcatctgggaatgtctcctgccccactcacttccctgctgggttcacccttccaaacagagaggggctgagcacacccaatgtgctaaatatttccctgctgcagaatctattttgctgctgcggctgctgcttggcagcaaagagacaggaagctatttagatatattatcttccttttcaggaagttgagaggaacttttctattgcagttcacacaaacattccgtctaatggtcatttagtcatgccggctcattaggtcaccagtgaggaatgcccaggctgattaaacatcattccagcttctctactcgctgccccgggtcccggggagaaaacagagcttccatggcctggtggtgaccaagacaaggagcccatcctgaaagccacaggggctcactgccaacctcacagcccctccccagctcccacacggagcacttcttacttctaagggggcgctgatggctttataaagaaatgtgtatgggactgagtaggaaggtgggccccatgaatacctctggtcagataatgctgtcctttaagggagatcaaagcgggcccttggcagaaggccctgagaatgctgttaccaaaaaatgcaagacagacccatgatgaggtcacagagatgaattgatagctagaacacaagcttgtgcagaatgtaacaactaactatgagtgagtggtggttatgcactagacatattccaagtattttatgtgtattcactcatttaaggcttgaacaactcaacgaggtaggaatcatgaggaaattggcccagaaagtcaaatacggtatttctgcttaaggttgcacacacagtggatctagcctgtgctctgcattaggactttctgcagtgatagacatgtcccatggctatgctttccagtggggtcaccactgctacatgtggctattaagtccttgaaaagtcactggtgtaactgaggaagtgaattttaaattttatttaactatatttaaatttacgtggtgcatgtggctagttgttaccatattagaccccctggatctaggtggtctggctccagaatccacacccttaaaccttggactgtcctgccttttaaatcaactaagagaatcaactacttactgggagaataattaaactctaaaggtggagtttaggtagagtttcatcaatatcttaaaggacaagaacatgtaagaaattagactaggaaagagagagaaaagctagcttaaattaaatggtaggcattcagggcaggtgtttgggagggtatatctataaaaggaagaaggtaaaataccaacatggcttgtcaagagaagaagtggtttcctcttgtctaaccaataaattatattgagctcctactacgtgaccttactaagtcttgccctctagagtcatgtggcctgggtgggaagccaggtatgatcccctaaacaatgccaggctgcatgggccagggcagatggcaggactaaagtctgtttattctgttggtattccagttagccgttcatctgtaaagacaggagtgatcaaggaagtcttcatggaagagaaggcatttaagctggaatttgaaagaaatggcttgaattagaaaagtgggacagtggaaaggatgactgcaatgacatacttggaaggaaacatgaactgttcttggtgactcttagagactgacatacggagagtaatcaaaaatgactttacatgttttggcttggataaaaatagtagttcttggggcaaacacaggaactttagggggtggtaggagatagtttcagaaattatgactttggttttgggcgtgtggattctgaggtgacggattgtggaaatcttggattaatatccacttttcagtttagatgggaggaggatggattagaaggctgcccgagatcacctccattcctggcactcagaggagctgcgtttactctaaagcagagaaattaggccaaggcagaatgaagaggagccacaggactccagagaggttcacgtcaccaccccacaggggacaaacgcataccttgttttctgagttgacagacatccggttacttcatcttggaagttacattcatctgccctttggaacatcctgcccaatgaccgattttttaaaatagcttcttttccctgattatatttgtaatacctactcactgcaaaacatttgagaaagctcaaaaacagaaataaggaaatgcaatcacaaagacacacacacacacccacacacagagacatatatgtatatatagagagagacatgcacgtacacacagacccgcacatgtatgtgtatgtttgtgtatagtgtatatagttttcatccattttagctggtatttaaaaatgcacttttagctgacaaaatctgtaagaataaacaagaagataacaatagccaacatttattgagttgttagtatgttgtagacatagggaaaaaatatacaccaatctctgcacacacattttaaaacaatctgttcctaaaatgcatctattggctctctccttattacccaacattcttcaacactcaggtacgtgcgggtacctgtttaacatctctttttgccatgtgcttattttccttctaactagaaagctgtagtttcagaatcacctgtaacagcctcagaggcagcctatgagaggccaagaagagacagagttgggggttgacacatcattagggatccaaaaaagcagaatccctgccaggagtccccgccaatattctaaacctcaaaccttgaattgctgaatctaaagaatgccctggacaagaaaatcaacattaaacacacctagagaaatacaataaatagacacatatgaacagtgcaagcagagagattgagtgcctctggaaagagacaagagtggggaaggcgtgcaaggaggtaggacaggacccgggggaatttgtgagctgctgtctttaacctgtcccagggaaataagaattgaaatattccctagtgaatatgattggcatatgcagttcatccacagatcatggaaacacacccagatacagacacacaccacatacaacctcgatgggcaatgcttccctcccaccttggtctcctggggataccaactaagagactggtgcttcattcttggagacagccacagtctttgtttctggaggtgggtggatcctcatctggttcattttttcaagaaactgcctgctccctgagaaaagcttgctggggagagagttgtctcactggatacgtctgcggaggggaagagaagggatggcctttcctccaaagataacacagcagcccctgacctcctgcgagtctccctccaaaaccttcctaatgagctgtctctgggagggggtggatattttccacactatcttggcctctccttgggtttttttttgaatcttcacttttccatgccataaacaccgtttgccatgacctctccctcactgccatctcggacagcttctcatgcgtgaaacatatttttgttcattactttgttgtccacgaccttccttcccaaccgtccagcccgggtctccctgcacccttcacccccacgtcacacatataatgaattgctattccttcagacaacggggtggaaaactgtggtctccaaggcaacggggtatcctggggtggggtgctggggaggggggccttgcccggccaggaaaggactggaagtaaaggggggtggggaggcacaagccgagatgatatcattcctgaagcctgcaagcagccaatccgctggtgaggatatgatgtcatctcccccgcccccgcccctcttagcctaggtagccccactgagaattctagacaagtattgaactgaagttgtattactgtgagagaaagggggcgggggatggcgatgggagagagaaagagatctacggaccctctggatggccggagcagacactacagtcttcaccagaggcagccccataaaaatgtcatcgtctcgggctctccccgcattacaacacaatgatttctttggggaggagaaaaaaaaactaagatttattttgcaaccacacctccgcctcccttggaagagaaatactgaccaacaacaagttgtgaatgaaatgtctgcagatcggcccccctcgcccagcctgagaactttccagacggaaaggcgcacacgtgcacacagcaccagctgagccgatttgtgctgctctcagcagccaccggggatggaggaaccgctcaaggatctccagagtgcgagcctggttcgggacaaagttgcccaacctagtggtgtgagccacgtaaggagctggggagaggggagtctgtccccaagacaatgacagcatctagggctcagtgccaggctcccgggagaagcaaacaagccatggctttagggaggggtgcaggctcattagagagcccactgaagtgttaccaccatgcagagaggaggggtgagagggcacggctctcctctgccagtttttttctcttgggacggggaagcagtgctgcttggaaaatagcaaactcaaaccttccccccaaatgccagaaatgttcccgggagtccaggccacaaggacagtgtgtgcaatggcttggaccaggccagagctgttctccctccccttaaactatgcataaaaaggaggttcccccacatgctcctcctgggatctttctggggttatcccacatgaacccgcttagattgcctttgaggaaacagagaagtgaagatcccccatccactccccattttggaaaagtggacatcaaggcccagagaagggacaggaccagcccaatgaccaacagagtcaccagtgactctggggctatgcctaggactctgtctccagtctactgttcattcccaaggacaagcccacaacacagtagcagcacctgcagatggaaagccttcgatctcaatgtcacctgtttgccgctttctgcataagtaatgtcattgttggaatgagtttatgatggtctccatccccatttctatgagctgtgagcaagacatctgctgcatagctcacgtgtgttcaggcctccctggaccagcagctctgactcacacacgcacagaacggtaaggcacagcctcactccctaagggcccgagatccaggaagggggacaaaacaggggtcatgtaaacatgtgtgaattgcatacacgagtaggatggatgagggctgggtttgctcaaaaaaaagaggtgcaactctgacttttaataaatagttactggcgtcctactctctgccaggtgctgaaatacaaacatgactaggtctgagttctaccctcgtggcatttatatcaagagaaggagactgaggctgtaaacttaaatcttccctatggaagccccaggaaggcaggggcttggttgtatggaggctgtatgaacccggcacctagcatagcgcctgctatacagtaaacacacgatatgttggatgaccaaacagaagcagtgcctggaaggatgtttctaactctagaggacgttagcgaagaggtgatactcgaacggggctttggaagattaatgatcgcttgccaggtgaaaggagggggaacattcaaagtagagggaacaacatttgtaaaggtatgacatataagtgcaggacaggataggttagataagagaatgaataacccctgtattagtccgttctcacactgctataaataactgcccgagacagggtaatttataaagaaattgactcacagttccacatggctggggcgacctcaggaaacttacaatcatggtggaagggaaagcagtcatgtcttacatggcagcaggtaagagagcatgtgtagaaagtgaaaggggaagagcctcttataaaaccatcagatcttgtgagaactcactcactatcctgagaacagcatgggggaaactgcccccgtgatccaatcacctcccaccaggtctctccctcaacacctggggattacaattcgagatgagatttgggtggggacacaaagcctaaccatatcaacctccaaatccccatggcttaagataacaaaggtctgttgcttgtttttgctacatgtccgttgcaagtcagctagcgactctgctccatgctgtggccactctctgacccaggctgatggagcagccacaactgcaatattattgctggtcaccagcgaagatgaaaaggagggctcagcccttaagtgacacaccctgctgcttataactcattggccataactggttacatgaccccacccaaccccaacaagggccaggaagtacagtcctaactcaccataatcagaaagctagaaatattcagcagcagcattaatgactatcacacaaagacatgtaaaattggtcttgtgtctttggggaatatacactgtgagctgcagcagtccaggaaggcttcatggaggagatgggctcaaaacgggctctgaagaatagacaagagccaggaaggcagaaagaagagggaaaggcattgcagacagcagaaacaagccaaagccagacactgggaatgaagctggtaccaggcagctggcagggatgaggaggtggactagagcggcaggatttggttattttaccaactggatgctgatcctttcacggtgtcaagaaaaattgatccggaacaccagaatgctaggtggcgctcctgcaatgcatgctttctcttttgggccatgttttaaaccttgtatttgggaaaatttcaaatttataaaaagttacagaaatagtaaaagaaatgcctgtatacccttcacctagggttttctattattaacattttattttattgagacagggtcttcctctgtcacccacgctggagtgcagtggtacaatcacgaatccctgaaacctctgctccccccagctcaagcaatcctcccacctcagcctcccaagtggctaaaactacaggcatgtgccaccatgcccagctttgtgtgtgtgtgtgtgtgtgtgtgtgtgtgtgtagagacagagttttgccatgttgtccaggctgatctcgaactcctggactcaagcaatccacccacttcggcttcccagagttctgggattcacaatattctcctatataaccacagtgcagttaccaccttcccaaatttgcattgataaactactttaatctccatctatgttccagttttgtcaattaatgcaatactttcctttcttccatggtttccctccagcttagaatccaatctagagactggcgttgcattaagctgccttgattctttggccacctccaatctgaaacgttgcacagctttctcacctttttataacaatcacgtttttaaagaacacagtcccagcttacacctcttttcctttaatagactgttccacctggggcttttgtctgatgtttcctggtgaacaaatagactttgtacattccgggcagctgtgctactaggtgatgctatgtcctcatggtgtcccttctggaggcacgagatgtcatctgccctcttgggtgattatatttttgatcccctgcttaagatattgcccagttttcccacaaataatagttgcttttgtggggttttctcttcccttgcaaattaataagcagtcagaaaggacacactttaagatgatacaaatatcctgttcctaggccgggtgcggtggctcacgcctgtaatcccagcactttgggaagttgaggcaggcagatcacttgaagtcagcctggccaatgtggtgaaaccccatgtctactaaaaatacaaaaattagctgagcatggtggtgtaaccccagctactcaggaggatgaggcacaagaatcgcttgaaccttggaggcagaggttgcagtgagccgagatcacgctactgcactccagcctgggtgatagagtaagactctgtgtcaaaaaaaaaaaaaaaaaaagaaagaaagaaaagaaaagaaaaaataaaagaaacaaagaaactcaaagaatcaactctatggaaattgctggttccctttcggaacagattcttggagccaaaagaaaaggacgtagaggcacaaggcagagacgtgaagatatgatttccttccaccagtgcagctctgcatgccacattcttagcagtttttcacagcctggacacaagggtccctatgaccatcttcatttttggtgccagcgctgtccaattctttgttgggttactccatccccctatgctgatcttctaataaataatacttgggcgaggtttctctactcccattgtacatatggtgacactgagtttcccccaattcagaagccttgccttaaggtctctccagggacaggaaattatcagcttccacatgggtcaggcagtgctagttagaggggacaccagagtcactggcccctcataacaggactgtaaagaacagtggtttccacctaagcaaaatggggaggccagagggctgcagagtgtgcagggcggtttctgatgcaggcaccacataacccttattcttggatgctttccctccagcatccttgcatttttgttttgcttaagagatggggctttggaatcagccatctgggacaatttcctttaacctccacgagcctgtttcctcagtaaatgggggtgatgataccgacatctcagggctgtgttatggttaaattagacaatgtatttttcttttttttttttctaagctcacctgtccttataattctttaatgcaaatgagtgctaatcactagagctaaagttacaacatacaattaataaacatgggccacaaggatataataatgtgtttccatagcttttgaactgtttttcaggtagagtttgatcctgtatcataacctgaggattgattgaacttagacaatgtattttccacttgtgcttagcccagtgaccagaagaagcctcgatattttgaaagcacagctgtatttctagaaaaggccttcaaagaggtaattaaggtaaaacaaggtgatatgggtgagcccatttccaatacgactgatgtccttataaaaggaggagattagatcaatgtttcagatgatggctatgctgatcactctgatctgatcactatacagtctgtggatcaaaacatcgctatgtaccccatgaatatgcacagttactatttgttgattttttttaattaaattaaattgacttttaaaaaaagaaaaaaaagagaccagctggaacgaaaaaaaaaacaaaaaacaaacaaacaaacaaaaaacagaaaacaaagagaaaaaataacaagaagaagaagagattaggacacagacatgtgcaagcacagagaaaaagaccaggtgagaacgcagcgagagggagaaggcacccagtttttaagccacagagaggcctcaggaggaaagaaaaaaacctgcagacaccccgaccttgggtgtccagcctgcagaaccggcccacggtgaagcattgctggaactcactcctcaggggatgggattgggacgggtcatctagcccacgcctccaacctctttgaccaagttcctgagcctttggcttgaaagaggggggtggaaaacagaaaagacaccactattcattttgcccagctcgagcgttcacttaaaacagcccagatcagccgggtgtggtggcttacacctgtaatcccagcactttgggaggccaaggcgggtggatcacgaggtcgggagttcgagacccgcctggccatcatggtgaaaccccgtttcaactaaaaataccaaaaaaaaaaaaaaaattagctgggcatggtggcaggcacctgtaattctagctacttcaggaggctgaggcaggagaattgcttgaacccgggaggcggaggttccagtgagccgagattgcaccattgcctgggagacaagagtgaaactctgtaaaaaaaaaacaaaacaccgcagtccagatccactagcaccacacacatccctccccagagcccgtgccatagcccttgacatcagagctgggggtcagagcagcactgaataaaatccctcactgttggtccatggcttctgacaagctagttctctattgccattcacccactggggggcaaggctgctgggccagatgtggagaagatgctgaaaccctgagtcaacagtcagctcacctgagacactggctgcttaggcagaggaagacccgaccttggctcctatggggctgccagccagcatcagttcaggctgcatagaagccccttacctgactgaccaggcaggccaggaagaatcccctttcccttgcattctcacaaggcgcccccgccaccaaccccatgtcttcatgtcacttgaccctggctgctgccttcctagcagtcaggaggctctggaagatggaggagtggaaggaggcgtgggaaggtggagggctggagggacggcaggacctggagaggacccttctaacagttcaacttggccctgttccacggggcaggctgcccgcacttggggctccatctgtggcctgttcccatgcaaccttggccttctccccgcaggcaaatcagggcatgtccagaaacgattacaatcagccgcactaccctgagagctgccccagagcccagccagggcagaaaacacactgttcttccattttatgaatgagcaaagccgtatgctttctataaatgtctgcgtaaatcatcggtgtgcattcccctcttggcacaagaaaaacccaatccagactgcacaggcagcttcttctccaggagggaggcccaggggccgttctctccatttcttctgggctctagggagctgcctcctgggctggtctctggttctgcagagaaagctcttgctcggacaatgattcggccccaaaggggcaacagctcacctttccaggggcctcctgggctgagctccaggtgaggcccagccagacctgctggggttcaggggatgttttgtaagccatcctcctgggagctccaactctcccaggcccacagccctaccctgcccatcacagcctgcacggccattggaaaggtctctgtgccactggcattttatgtaaaagctccatgtccacttaactaataagtaatcattaatattacccctggcccatgtaaccaactgttaaactgacactaatgaagtgagtcgtgggcaccatgaccaacattaaagccaagtctgaactgttcacttaaatgactcaggctgatttatacatcgtgccttgcatttaaccagaatggtgggtattttatatcaaaatgcacagacattccctccatcctggctttattctttctgactacctcccagccccaactggatcagaccagaccaaaccagatggtcccggccttaattatctggatcatagtgttaccttcttggtgaaaatgcattcccaaaaactgggaaatggatggaaaatctggtgttcaaaataatgtattaatgagcacgtttgactttgactttggagttggctgaaatgagcatgctatgaaatttggctaattcaaatgggttgagtcctcattttatgaatgagcaacgctggggaggaaggggagcaagccggggaggaagacaactccatgttgggaggacccatctctgcaggtgcggcttaccagcctcactccaaggctggtttctaagaggcaggagaaagtcacaacccaggagattcgagttagggaaactctgctgaggacactcactcctgcttctgcccttaccttcttcccaagcatgctggggttgggggtgtcccttttaatttagaggttagtgacacatgcatctcataggacattatacttgtgccagctagcctgccttcctcgtggacccacccccagcttcagggacaccagaggcagccacttgcctccatcatctacccaggaatcacgcacaggattgggagtgggcagcacctaggaggagcgaagctgcaaggagccctgagcggggccaggtgggccaggccgggagaccgggtggccgtaagaaccccagggctcctctgggacagcatggcatgggtgtttggggttgggcagatgttggggcatttcccttctaaagaccttggaaactggtgcttccacagccaacattgagagtttggggtgggagaattccgggtctgcagatagcacctgctccctgtaaccccttgcagaaggacagaggggccaatagagaggggcaggtaaggagccacctggacaatggctgcatcgaggccgcctgggataaaagttagatcttaccctgcaatcctggtagacgcaccaggatacccatctcgccatgtggcaccatggactgacttggagcaggttaacttcactgcttgattttttattttttttcagttcactgtttggctttgattcctagatcccttacagctgtgtgaccctggccaggttacctaacctctctgaccttcactttccacatccatgcaatggtcatgagaacaaccacaccattcatgagaaagggttaagtaagatattgcatagaaagccctttgcacagcacctggcacgtggtaagtgctcctaaaagatggctattgtcatcttcgttattcttcccttcagctgtctaacctctgtgcctgtggacaggaggttctagtctccccgctttcccactcatcagcctcacatcctcctgtttactctcaggagagttggtggcaggtctgagagctgtcggttgcaagcccagcgatctcagcagagccagctctcagcaagtccatttccacctgaactgccaaggtgtgcagtcccaggccaggcctgcgggctgtcacgtttagcatttggttctctttccctctactccttgcctcgcctgcccctaaggacgctctcagccaccctgctgcctctgtcaggccctaactcgttcggccggcttgccttggtaccggggcttatccaaacatcttcatcgcttttcataaattcaatccctccttatcagccgcaccatcaggaggaagggcaggaggggcttgtgactgaagtgtggggaagagaagctttaattagcctccttgcttcgcggggtcacccgcagttcaaccgccctgcctccgcatgctcccaatcacgtagtgggaagccagccctgccgcgatctcgccacgctgcacacagcctgcatggctggcctctgctccccgtgtccagggatgggttcctgcccctggctgtgtgctgggcaggagtcctgcaaattggaaaggaaaatcagccagcaccatcccttagaacatcagttttgagacagccgctttgcccccatctcccaactcacagtacaatactgctgcagcaaaaccccaaccttggttccatgagcaaactcactttgcagagagtgccaagcctctctgtcagaatgcaaagtgcttttgccagtcctcaaaaatggcctccgtgataacgaggttaaaagagcactgggcttcaagtcgagcttaccgacattctgaattctgctgccttttagttgtgcagccttggaaaagtttcctcatcctcaaaaataacagagcatggatgagagtacctatccttcctaccttccaatgctgtgagccctaagcaggaacatatgcaaatatacttcccagtgtgccaaattctaaataaatgacacgtattcctagccgtccagcccactaggcgtgtggcaacatcttgcccaaaatatcaggctcagagactgattctttccacacttgtttattcacttaactcggccactgccctgaagcccaatttcttccatgaagaccttaacctgaatccccagcaccttgctgctaggatttaaaagctggggctaatttttcctggtataaggacattgtccccaactccacccccatctatcactggttgcttactcttcctgaacattcaaccactcggtgagggttgtacgggaagccaaacacagcccttcccagatccctgccttgtactttacatcagcttcaaattccctagataatcaaatagccaaattcatttgataacagcatttctttgcaagcatgcttctcagtgccaagcctcatactagcgcctaggagaagtccttggctgtttctgggctgcccagaggggcaataaacagtgagaccctagggtttactctccgactaggactgtcttgggcaaatgactatggatttcttagatctttggggagaaggcagaggcaatttcacagatagaatccaaagagtggatgctcaaaggtgctgaatgaatgaattctttagtcatcatgttctctgggagaaacggaaactctcatccttcgatttggttcataaacggacccatcggagaggagcccctcacccagtgctcagcctagtgctgacccattaacatgcaatgagtgttagaccagaggagacagatcgaagagaaagagacacagtcttagattccccaagaggtcccagcccacgcactcatgattatgattatagctggcatgtatgcgttatccaggccttccgagcacattctcatgcattttctcttttgatctgaggcagataacgcagatgggagcatgcgcctggaaggccaccctgctgcacagcacactgactgagcaagaacaaagaccgtaaatgaagaaggatgtttgcattctgctcctcgcttgcctgaaaacaggaaactttggagacctgttctggcaaggtttccacctcttcctcaccccaaaggtgaatagcctaagaggtcttatttttattacttttttttaagaggacaaatcctttccaaagcacttttctttttcctttcgttttgctgctgtgatagggaactgtgtgtgttctgatggttcaatggggaaatgaggatcgatcatgagtgattttcccgaaatgcaacctgtgcaggtcttgccttcctcaagcacctgcgaggagaagtcgtcactagtggggaattccagcaggtgacccaatcgagacagctgggcaggctcctggagctgatggcttgggaaggagggagtcagaagtggcaggcccatggaggtatgcctgtccgcggatgaccgggatcacaaaacaatgacactgacttgtcgtggggatggtatgaacagacatgaggaaggattggagaagatctctgttgctgacagaggacagggaccagtcagctaggaaacccagaggccagatatgtctgagcgtaggagcaggagcagtgaggtatctctggaagcagcaggcaggacctgggctggaatggctttgtgagattctattctgcagcctcggcagcctgagtcttacagccccaattcttaaagttgaaacatgtgcaaggtactaaatctctgtatcagtcagggtcctccagagaatcagaactaatagtagatgatagatgatagacagatgatagatacatagatagatacatagatacatagatagatacatagatacatagatagatacatagatagacagatagatgatagatagacagataatctattttaataaattagctcaagcaattgtaggcactgggaggtctgaaatctggagggcaggccaatagggtggcaattgtggatgttgcaatcttgaggtcaaaatctgtagggcaagctggcaggctggaaacccagccaggagttgatggtatactcttgaggagaatttcttcttccctagaaaacctcagattttgcttttagggccttcaactcattggatgaagcccacccttattcccaaggataatctcctttactcaaggtcaactgattgttgatgttaatgacatccacaaaatgtcttcacagcaacgggattgcttcacagtaatgggattgctgggtcaaatggtaattatccttatgattttcttaataccattgtcttttctctaccttactttattgtagtaatacagtatatagtacctataacatacaaagtatgtgttaaaataatgtctatgtcactggtaagtcttccagtcaatacaagtctattagttaggtttcaggggagtcaaaagttatacacaggttttcaactacctggtggctcaacacccctaactcctacattgttcaagagtcaactatatgtagaagttgaaccagaggctatccacttgtagcaaatggttacatcacttatcacatatgctatgtgatatcacacatgctatggaatatcatactgcagttacaaaagaataaggtatccatatacactgatggggaaatggcagaactatgcatatactacgtcttagtctgttcatcccactacaacaaaatatcatagcctgagtggcttatatatgacagaaatttacttctcacagttctggaagttggagattcaaggtcagagcaccagcctggttgggttctggtgagggtccttttctgggttgcagactgctgaccccttgtgatgtgctcacatggcaaaagggggaaatagcttcctgaggcttcttttataagggcactaatcccatatacaagggtgtcatcctgatgacctaatcacctcccaaaggccctacccccagtacatcaccttggggttagaatttcaacatatgaattatgggaggacacatccagactatagcatactataagccaaacctttaagctctatcttcacttgtgtgtttgtgtgcactgtgtgtatgtgtgtcccgaaagaagaccagaataaagtatacaaggctgttctagtggttacccagaggaggaaagtgagatgggtggtggggcaagagagatgggattagtcaacctatatataccgatcctgttgtttctaaccagaatgtagtcacatgtcatctatatgattttagataacagtaacaacaacaataacaataaacaaagaaactgagtaaacttaggctagttcctgtcattacttcagaattgtcccatcttctctagtctccaaattctcctgggtggtgcctgtcaaaagtttagcttactattaaggagtgtgtaagcaagattgttagcaaataccatcataatgctaaaatttttccattgaaccttcagttatggtatcatttagggtcctggcaggaaataaatgacacactcaagttaggtgattctgaggtgagttagtaaaggggttatcgtacaaggtgtgtcatgcaggacagtgccacccatagggctccagtactgccctcgagggagcagctgcaagtgaccacacagggggatagaatggggaggggacggttgggcgcagtggctcacgcctgtactcccagcactttgggaggccaaggcgggagatcacctgaggtcaggagttcgagaccagcctggccaacatggtgaaaccccatctctactaaaaataaaaaattagccagatgtggtggcaggcacctgtagtcccagctactcgggaggttgagacagaagaattgcttgaacccaggaggtggaggtggcagtgagctgagactgccccattgcactccagcctgggggacggagtgagactctgtttcaaaaaaaaaaaaaaaaaaaaaagaatggggaggggacagtgtgatggttaatactgagtgtcaacttgatcagactgaagaatgcaaagtactgttcctgggtgtgtctgtgagggtgttaccaaaggagattaacatttgagtcagtggactaggaaaggcagacccacactcaatctgggtgggcaccatgtaattagctgccagtgcggccagaataaaagcaggcagaggagcgtggaaggactagactagcttagtcttctggccttcatctttctcccgtgctggatgcttcctgccctcaaacatcgaactccaagttcttcagcttttggactcttggaccttcgaccacagactgaaggctgcatgcactgtcggcttccctacctttgaggttttgggactcggactggcttccttgctgctcagcttacagacagcctattgtgggacctcaccttgtgatcgtctgagtcaatactccttaataaattcccgttcatatctacatctgtcctattagttctgtccctctagagaaccttaatacaatgaacaccgcagcctcactctcctcactctctcccatctcccaccaaagttcaccattttccaaaaccaaccagaagccctagggggcagggagagtgttgatgcagttcatacaggttagcctcctggagcacagagcagggtagggcagagtagagaggggcaagcagggaaatccacactcacagcagccattctaatgagaaaaaccatgaacaatcacagctagatttttggctgaaacattacgctcccatttggctatgcgtatgtattttgtctgcgctccacttcatctcaaactggttttgtgctcttgggcaccctcccactccagtcctgggcccctaattttttgatccataggatgagggtactgggtgaatccaattatttccgagattctttccagctctaatggccataactctcgagtctagccctctacctgagccttgagcctttctatggttggaaactgctggtgacaggtcatgagtctgcaggggtctttgtgcagatcctgcctcttctacttggcacaaagaaggcaaaacaggtctgcaaaagtgggccagttcttaacactgtctgtgcctgggctccccactggaagaacccaaggaaaataagtaaaatctaccctgttgaactgacaggcggtattgctgattcatcatcaccagacaagaggcaggtaagtggggaaatgtagtaacagagctttttttttttctttttttttttaacctatttcagtgccctgttttctcctctatgccctgctcagctacaactctgtgaatcaggataaagatagttcaatttccagaagtgttgccaacagcccccattcctcaaccaaatactcacatctgagaaatgtaatgtgcaattcacatgctatttgcatgcccttatcctaaacaggagaatgacccattgtcgttggactctgcctttccaagtcgtaagctctgaggtctcctttctctcaaatctggccatgcccttgaaatcccagcatgcttctgtcctcagagcataggggctttttgttgtgaccttgaaccaacagtgcacaaaatctgagaattttgaagaatacagaacacaactttatgccaagaagaagctatagttgtgctcataaattcttcctccaaggcttaaaggtcattccctaccatttttcttgcagacttttggtttcaatataaggtgggcctgctcaaaggcaagaattttcctgggcatttttttctcaagcattgcagctgtacttaggtgaggagccataacaatgggatgtggaatagagccaatcagctgaagaaattgatactgaataaggaaatatttcttaccagtgagagactctcaacaatgaaatcagtgccctagcaatgcacagcattgcaagagattgagtcacaccatgttagggtccatgccaatatgaaacacccaattacccatcctttcaggtatgagagttaagaaagacatgctaggagggtctcagtgattcttcctctgcttttggttgattttagttttcagggagtgatttggttgacctgtgaattcttagctttaaataaatgctggggaccatagagatgagagctgttcttcatctgtggacctcctaagagaaaggaatagaattaacattaattgagaatgaatagacagccaagcaggattctaagggttctataaacattattgcattgaatcatcgcaaatatcatgcccatttaaagatgtggaaatggaggcaaaggaaatgaagtgtgtttatcaggaccactaacctgtagggctaatacttaaacctgggtcactctgactttggtggccttggaggcccgcccacatcaacacaccacctaggtgaggattcagataaactgacttcagtctgggtttaatgactcttgaggtctcaaaatggcagtcgttaggtttgtttctattctgtaggctgtgccgttcctcccagagctgggtctgcttccctgccctcctgactgcctgcaaggaggtccagccacattgcagaggaaggacttgcttatggaaagaaatggagagacccagcctccctcacctcccattggtgcctgatgattaatacattttttgctgcccttggaaatggaagacagtgccaactgcttagttctcctggctgggccagcgcaacctgtatgacaagggggaagagcctttaagtgaggcaggagaggagctgggctctgggcagaaaagctccccaaagcaagtgtgctgggaggatgctttttgtattttaaccaatgttcacctctgtctcccccagcacaatatttccttgcactgcttggtctttcctcgtctagttagtgaggccctattgaatttgctgcattagagtgtggataacacccccaaatcaaagaaatagcataatacaccctggtttttgagtttcaaagaaggtttttgaaaggtattgcaaatacaacagatttggaagaacatgtgctgaggtctagtgaagcggcccttagataaaagctgagagattccgtgttgggggagcaaagggagccaggctcaaagcagagagtgagatgatatgccaagtactgagtcaggggtactactgagtactgagatgatatgccaggtactgagtcaggggtactgctgagtactgagatgatatgccaggtactgagtcaggggtactaccagggtgctctgaataagtagacaggcatgtcctctggttgggatcaaaagactactcggcagtgcccagggtgaatgaacggctgaggaacccatagcagcctgttggaggtctcagatgagcccagtgcagacatgtgatgtagagagcacactgtcccactccgtaattgccagagcattgttagccttccctgttccctgaacttagaggcaacacccatgaaaagggtaggaaggatctgaaatgccccactgcaattgagttatcagataatatgagttctatttcttgcatttctgagtttgtaaactgaggttcatgctggctctctgagtcaggcacctccctgagacagatctctgccacccgctccctctccacacagtgcatagagtttgctccctcccctcctcactgcaaggctgctgggcacctgccccgtgggtatctctgtcacccagaagactcctctacccccctgcctactgcacccatgcaggcttctgcacagccagacctgttctcttggagtcttggactttgacctgccccatcaaaggacagcagccaaggtgacaagcccatcccagttcagatcctctggcagaggtagatactgaggcaagagacaggctaaagggaaagcataatatcctccaaccccccatctctgggaacactgtatctgaggtttgtttggccacccaagatgctgggctctgccagaccagataaccattccggtttgacaggcacccacggccccctggtatgcgcctttgacccaccagatagttctgttttccttttcctctgagatcccccgagcttctgttccccccttctcacctggctggagagatgtcacccagctaacatcttctaaccctacaagaggcaagttacaggatgccccaacatcatgatttttttttttagctttcaaaaccttggaagtactgcagggtgaaccatggtttgagataccttgcagcagtgtttctctgccatttccccctgcagcacatgtttgtctttctaaaatatttcttttccttttctttttttttttttttttttgacggaatctcactctgtcaccaggctgaagtgcagtggcgcgatcttggctcactgcaacctccgcctcccgggttcaagcgattctcctgcctcagcctcccaagtagctgggactacaggcacacgctaccatgcccagctaattgttgtatttttagtagagacggggtttcaccatgttggccaggatagtctcgatctcttgaccttgtgatccgaccgcctcggcctcccaaactgctgggattacaggtgtgagccaccacactcagcctacaatatttctatttctgagtttgtaaactcagaaatctgagtttagggcaaccagggcaaccaaattactctctgaaaactaaaatcagctcaggtttgatctcctaccatgcaccaggctctgctgtagggaatgggatcaggcataagcaagatctacagggttcctgctctcagggagtgtccattccaccccggaagggtagacatggagatgcatggctcagatccttcaaaaaggacttgctgcctgactgagaggagcttgactggctgacagccactgcactggtgtcttcgaggtcctcgtcagttttcaggctgaggtcatgctgttcttgaggcagccctagctaatgactatgcaaggtggtggcacaagggccaacccatttctacccacatgggacttctccaatgggcagtctctgctccaaagctcctggagactgcccaggttgccttcacgttctgatggttccccctgcccaatccagctccctcctcttttccctcataggttgcttattcccccaataaacccataactccatctctgcattggcttcctggaaacccaactggtatgcgggggacatacacaccagcacgagtgtcggtagtgacacatgctatgggaaaagaacagagcccctggacagaggctgactcactactagaagagggccgggttcgctagatgtcaggtgcacccagcctctgagaagggcatgtgtgagctgagacatgaggaggaggagccagccatattcagaggagccgggaaagggctccaggcagtgtaggaaggaagacttgtattggaggtccatgaagaagcaactgaatagagcacagtgttgagagatgagagaggaaaaggagatgaggccaacagggccaacagagtcttggatgtccagttctcctccaagtgaacttcgagaacagcaacgtgatctgtgtgcagcatgatcccacagacaaacccaaatgtgatgaggcaataaaacatggcaataacatgtcatcgccagactactcacagctgattagcaaaagcagctaacctcatcctggctgtgacctccatgagacaggctaggagcaatgggcaactctggccactcggaaaatcatcttggactgcgagggagtgaaagggatgttgctatgttagtacctgctctgatttgtttttaaaaagtgaatcactcccaaacctcagggtgttattcataacccgtcacttgttctcctgcgtgatggtgacacatttgcatgtcatgacaacctggatgagcactgcttccctggagtaggggagtagggggggtgggaatggggggaggtggttgagatgccagagagccttgccctaaatcagtggttctcaactggaggcgatttggttccccaggggtatttggcaacgtctgaggacatttttagtttttacacttgtgaggctgggaatgctactggcatctagtgggtagaggtcaagggcatggctaaacatcctacagtgcacagaacaacccctgcccacaaagagtgattcagctccaaacgtcaacagtgctgcaatgagcttgagaaaccctgccctaaatcaagagccaaattgttcctctctgaaccaagggatgctctcagacaggggtctttggatgagggcacgcagcagagtttgataaatacaaccagtgggggctttctcagtgcggttctgcaaattgcaaacacaacatctaagtgtttgctcttcctttcttactgtagtttaaataccaagaaacatttccctaaaagaattttaacctctaagactgcagatgctcccacactggcatcttctaagaccagctgattgggccaacaggggtccagacccaaccagagacagggggatggacaagatgaccgcccataccccctgcacttaccccaaggaggttctctccagccaggcattttaattaattttagtccctttcaagaccacagttattattgtaaaaacaccgataatactaaacacatgtggaaagcacagcgccggctgcagccctggagacctggggacgtgctaagtcatatgtcatctggggtggtgagaaatcagcaggccccctccccctgccctctgagaccccaacacccttctcagtaggactgctctccttctgtcaccagccaagcccccttcctagctcagcttccccacccctaccaaaactcaagtacccttccctccccacagaaacagccaaggtgggtggggtggcaggcctctggaaatcctggtttaatgattttattaggaaagaggcgggaagaaaagaaaaggcacattctctcattttggaagaatgcttcattatctgcctttgcagagtgtgaaacacctcactgggctctaaccagccctgaattattgagtgagatgctcaggtgtcaggctttcctctcccccatccccctgggccaccccactggttgctggagggtgtctcaattccaccttcaggtgaaggctgggaaaatccaacagctacagagctgcatgggcattgtcctcccagaaccatgacctctttcgggagctattgcctgaaaacagtccccttggcatgtgtctagttccatcttcacttgtgtaagaccatttctcctgcattcttggcctcacatctgattcccaggtgccttttgcctcgtgaaacacctcactcctattttagaggttagaaagttccttcttagccaaaacggagctaaagacgctgacatttgggtagttctctgtgactgattgagaagtatgaaaaatcttccacttccacagccctgcttgttttcattccttgaagatgacagagtagatattgttattcccattttacagatggaaaaggcaaaatgcagaggggttaagtggcccttccaatggcacacagcaattacaaagcagagatggagggaacacggggctcctcaacaacagtctccctgtaactgtggactgatctgccccatgccagataatccccagcctcttttaagagtgccgtttacggacattctctccaaaccccggggttcccgtggcccctggaacagacaggaaggtctggttgctgtgttccagatcacagcctccatcttcagtttccataacaccagcttcagtgttggtccctccccagggtcagataccacctctctcactgggtcctcccctggctccacctctccatatgaacatctagcctcttcctgccaccactcttccctgcaagaatccctgcagtcacatacaccccccaccctaaactaggcatggaagttcaggccaaactaggaattcatcatctacggaaaaaagaaaaaaaaaatcttatttctgccccagttgtggggagcttggacagtgcggcagctcaccttccaaagacctaagtgacaagtttcttgaggacagccccttaagcagagaaaaacaaaaatccaaaaaaaaaaaaaatgaacacatattgacactgttgtatgttgtatgataaactcatttaatcatcacaaagactccacgaagcaggtgctggtattataaccttttcatatatagggaaactgaggcacagagcagccaagtaacttgctcaaggtcatataactagcaagtgagggaggtctgattagaccattgaaaacaaaaccaaaaactatcactggagggggtgtttagggaggggttataactgcccagtagtagccattttcccaataatctttccaggaggataaaatcaccattctactctctttagtgcccagtagttgtgagaccaaggcagtatctcagtggattagctgggcacggtggctcacgcctgtaatcccagcactttgggaggccaagatgggtggatcacaagtcaggagatcgagaccatcctggctaacaccgtgaaacctcgtctctaccaaaaatacaaaaaaattagccgggcgtggtggcgagtgcctgtagtctcagctactcgggaggctgagagaggagaatggcatgaacccaggaggcggagcttgcagtgagccgaggtcacaccactgcactccagcctgggcaacagagcaagactctgtctcaaaaaaaaaaaaaaagtctgccacatatataattagtttatataattagtacttaactatccatcttccttgggttttcttttccaccactgtatgagagtcattcctgccagctgccatgacaaaatcccagtggtttcacacaataaaggtttattttttcattcttgtctcagtctaagtggctatttgggagggagccttccaagtgggattccaaatgattcaaggtgccccgttccatccatcttgtcctgtcagactctcaggaaaagggcagcatgaagcatcactggaaacagagtggaccggctctgcccatattccatcagccagaagctagtccaatggtccgagctaaccccaggagaggctggggaatgccgacttccagcatgcccaggaagagaatatgcaatgctgagcatccagctggtctccaccagaccagttaatccacttcaatgtctccaactgctcctccatgacatgcccccaggggtcatgcttgttctccccaaacgtgatgctcaggaggactaaacctaccctctagacatggcctgctcatgccagaagacccagcaacatcacctccctggatctggacaccacatgtctatgaagacagcctacatatattttagcatttttagcaacagtcacactgttggatcgtattatgcttgtggtcaactaaaacttccagatttctttcttgtgaactgctgccaacggagggctctctaatctagttcttgtgcttctgaatttgaaaccacatgaaactgaacaacagttgttgaaagtcttccctcttgctgggtttggctgggcatttgggtctgcagagattatcagggatcctgatgttacatccatcgtatcagcttcgctcctagcccagtggcatctttggcctttccagatctttgggcaagtcaccgatacagatttagaccaggatgaaggctgatagcacaactacgatttgaaatgagcctttgattgataccttgggtatggttgtttagccctctgggaatctgtcgaacaagaccatttaccagctcacatttactctgttaaccagatgataaagtcaagtaaaacctcattcatttagtgcttactctttgaaagcatctaatttcccccaatatatcattcttgttgaactcaatatgctataaaccctaactaatccatggtcatagcaacgtatctgaagtcatacagtttattattaacagaacacaagctggaatgtagatgtcctgaatctcaatgctttcccatcatcaagaatctaatgtgtgcacagtgtaccaagagaccatggccttgaagcagaaactggccccactaaagtggcgccatgtggctgttagcacctcctctgaaatgcccacatattttccagcttgcaatttgccattcaccagtccacttctttgcccctccaattagaaagacaagaaatatgactgcaaaatattgtgttgggaaaactacctggagtcattcaggcatgactcacgtcacatgcgcgttcatgttcatcttgtacttggggaaaggcctcctggggaccctcatgacaaccatcaaaccccacctccacatgctccggaggtcaaactcagtgaggagggctggtgtgaattggtaaaacccttagctacagaaagctatggaagagagggatgtctgtttgatttccaagtacgcagtacctcggctgagagagcgtggccaagaagaggttctgtgggatctgataagaatccaccctaattaacacgctaattgtttccaagtagatgtttctaagggcttgaagagcttgtttgcttgagtagaccaaaaacctccccctctccattaaatattgtttacatcgttagttccctggacaaactgttttatcacaaaaaaaataaaggtgaacctaagacagggtgaaattattctgaattcttaatgaatgaaatccttgataattacaatctttttttaaaaaaaaaaatctgagcttgcaggatcttacttgggtataagagaaaatcatccaaattcaggtcgtttcttttttcacactctagaatcatatgtcttttgttaatttgctttttaatgtgaatgtatttatccagataactttatacgtaggagtgaggcactgggctgtgtaccattcattcattatctcagatgatcttcacaacaattatatgaacagtgcgagcaaattagccccatttacagatggaggaagcgagactaaagggatcacacagtgaacacttggtctggaaaaaaccagcaatcaaactcacgcctccgactccagcaagacttatggtcatataggcagtgactaaagcctataggtttttaagggcccatgaaaacatttgaaccctttaaaacaaaaacagaaacaaaaacaaaacaaaggactgactccaggacataaagaactacacaagcctgtaatcctagcactttgggaggccaaggtgggcagatagcctgagctcagaaggtcaagaccagtgtgggcaacatggcaaaaccctgtccctactaaaaatacaaaaaaattagcagggcttggtggcacacacctgtagtcctagctactcgggaggctgaggcatgagaatcgcttgaacctgggaggcggaggttgcagtgagctgagatcacaccactgcactccagacccggcaacagagtgagactgtctcaaaaaaaaaaaaaaaaaaaaacctacaaaacctatttcaccaaatatttagttaaatatttacaaaataacactgttaactagccaatggtaatttaactcaatcctcaagtagttaccagtgaatataaaatttcaattaagaatacagttggccctccctatctgtggtatgagtttggtagaatctgaagatacagaactcatggatagagaaggccaactgtagctattttttcttaaatctcaaagttacaaaaattatgaagactccctcatttctgcatccccataagatgaaatttttaaaaatttcatcttatgatgaaatttatgatgggtatattttaatgcttttgataaaatgaagggtgagccctccaaaaataagaaaactttggagctactcctttcttttctttctttctttctttctctctctctctcttttctttctttccttccttcctttctttctttctttctttctttcgtttttctttctttctttttttaagatggagtctcactctgtcacccaggctggagtgcagtggcacaatctcggcatactgcaacctctgcctcctgggttcaagtgattctcctgcctcagcctccctagtagctgggactacaggcacacgccaccatgcctggctaatttttgtattttcagtagagacggggttttacaatgttggccaggctggtctcgaactcctgacctcaggtgatccgcctgcctctgcctcccaaagtgggggctactcatttccgaaaatgagtttggacaaaatggatccttacaagccttgccttacaagccctctgcttcactacattttgtgttcaagttcgtatttcttaatccctgcaatggaacataggcctgttgttttccgtaacttttccattaacttacccatcaaccttttctgtatctttgcttatagtggacactcaagttaaatgtataaaacaagatttcttttataaatagttgaccgtgctctaaaattaaggaattaggataagtcagagagccctggagagacacgccattggcttatgtggtgtttcatgatgagcggggttaggacggaacaagctaggaaatggactttgtcacaggtaaaactagaaattggcccagctcaaagggaccagattgcccctggaagtatggagcaggctttttccaggaggagctggaagggtcagtagcacagtttgccaaacttcacatgtccccactttctgcagagaaaccacatgtggtgttgatgatcaccggagccctggcgtccagaaggcagtatctaggtcagaagttttgggtatcggcctggctgtcaggagactctctacctctcatgaggccttctgtctttatcagaagataaaacaaataagcgaaaacaacttcctttttttaatttttttatttttttgagacggagtctttctctgtcacccaggctggtgggatctcagctcactgcaaccttcgcctcctgggttcaagcgattctcctgcctcagcctccagagtagctgggattacaggtgcccaccaccacgcccagctaatttttagtatttttagtagagacagggtttcaccaagttggccaggctggtattgaactcctgacctcacatgatccacccgccttggccttccaaagtgctgggattacaggcatgagccaccgccccaacatcttgatttagagaagttgcggagaacccagctaaagggggaaagtgggttgtctcagggttgagctcatgtgagcccggctgagcaccccctgaaacaaacaccaacagcacctgacatttttagagtatttttcagaagacactttcaactagatctcacctgacttgattgtcattctgattctggaagctacatgaggcagaatactttaattgcagtaaataagtaaggttcattgcagcactatttacaatagcaaagacttggaaccaacccaaatgcccatcaaggatagactggataaagaaaatgtggcagatatacaccatggcatactatgcagacataaaaaaggatgagttcatgtcctttgcagggacatggatgaagctggaagccatcattctcagcaaactaacacaagaacagaaaaccaaacaccgcatgttcttactcataagtgggagttgaatgatgagaacacatggacacagggaggggaacatcacacaccagggcctgtcgggggtcgggggcaaggggagggagagcattaggacaaatacctaatacatgcggggcttaaaacctggatgatgggttgataggtgcagcaaaccaccatggcacatgtatagctatataacaaacctgtacattctgcacatgtatcccagaacttaaagtgaaattaaaaaaaaaaattttaaaaacataaaaaataagtgaggttcaaaaaagttaaggaactgcttcaaagccacacagcgaagcaggggcaaggccttcactagccccaggcctctgaacccaggtcctctcttgactcccctgcaggctctggctctcccacactgtggactgagcctcgcaagagagttaccagctcacatcctccacttcaggatacaaaaaaccagggacccaggcctgctggcaggaggccccaaattgcccaagctcttgactccaaaatagtgtttgtatgtctaagacctggtaacttaaactatgcttctcatttttgccctttaaagtagaccgggaggctgagtcatggctagctgagttggaaggtgtggccacccacccatccgctcctcccacccacaaccagtcctgccctcctgagctccggacagggtgggccaagggctgtgtagacagactaagcccccttctccccttctctccagacatagaaactgggtcttggtgctgccatgcggcttctggaccctcccccagtttggggcgtctcaaggaggggcgtctcatggaggggcatcccgaagtatctcttagagccagactgtggcatactctacccaccggacgcttcccagcacagggaagcctcccagacacctgagacccatgcagcaaacacaggactctgcctgctagatggggagcatcttgaggacattcagaggacctggttcatctctaaaatgccgtgtccaccgaggtgaccgttcaccatgacctctccacatatctattcagcagacatttgtccatcccctcccccgacccacatcatcctctccccaccagccaagggctgtttttggcacctgggacagagtctgtgcctttaagaagctcatggtctggtgggctagacagtcaagaaaacaattaccattcaaactgattcatacgattagggaaagcacagggtaaaactgtaaacccagagggggaaaaaaagtaaaagacacataaaatccagcctgggtttatatgtgtttaactcgtatagcccatccactccttccacccacagccattcctgccctcctgagttctagccaaactaagacccctccgatccacacattagaaaggaggtgatgtgggaacagaatcttaaaacctggctcacatcctgtgtccaaccggggctctgctgggtcagtttgggtcagcccaagggacagaaactcttgtccaagttcattaggtgcagtaggagtactacaaggctcctaggagtactacaagggcctccagagaccccattcccaagtaagtggctttctcctggggctgggggtgtgggtaggggtgaaggtttccctagaaccagtgagcagggagaattctgatgagagtcttcctcactgaaggcaaggtgatggctggaagggtgaaccccagaggcaggccgctcgggacacagtggccttcagcgggcaggggcatgaggacaagcaagtaagccaccaaagggcagctctccaggcctgcaaagagcgagatgccgactcggcttggcgaccttcccaggggatgagacagtgcaaacctcaaggcctgtggtgttattccagacgccaggctgagcttccctccaccatcacattaaggctcagctgtgcccagagaatgtgtctgcacacggcgaagggccacctcccagccccagccagccacccaggagcaacaggcttgactttcaacctgatcctgtgactaaatgcaggcccaggccagacttctcccaggggaagaccagacataacttggtcacttggctccaaaggagtcctgtggaatacggtcttatgaaagagggtctgtgataaccgcctgggggtgcgtggatgcaaagcacagaatttcttggtgggagcgggaggatctgcaggacatgagacaatttactccttgcttgttacatgtggcagatgctttaccaggtacttcccatggtttagttcagatcctctgaatcacactgaaaagtatgatttgttctcagttttcagatggaggaaacgagacctggagaggctcagtcacctgcctaaggccacccagcccaagtgatagcactgagttcagaggctggtgtgtctgaccccagcatccctgctctcctgagacataatctggcctgaatgaaagcacctcttccaacttactccatttcaattagatagaaaagcttttccagccaggaacagtggctcatgcctgtaatcccagcactttgggaggccaaggcaggcagatcacgaggtcaagagatcgagaacatcctggccaacatggtaaaaccccatctctagtaaaaatacaaaaattagctgggtgtggtggcacacacctgtagtcccagctacttgggaggctgaggcagaagaattgcttgaacctgggaggtgaaggttgcagtgagctgagatagtgccactgcactccagtctggcaacacagtgagactctgtctcaaaaaaaaaaaaaagaaagaaaagaaaagaaaaagaaaaaaaaggaaagcttttccaattatcctagggacagagcttgagagaggacagggacaggaagctgagagctgggacaaggctcttcaatgcagtcagttcagctcagccatgggacaccatgcttggggtatggggaggatgatggagggcccacaagaagaagaaagtggtacctggagagtgggctcctgatatggtttggctctgtgtccccacccaaatctcatcttgagttgtaatttccaggtgttgagggagatacctggttcaaggtgattgaatcacaggggtggtttcccctgtactgttcttgtgatagtgacttcttacaagagctgatggttttaaaaggggctcttcccccctcactctcttctctctcctgctgccatgtaaagaaggtccttgcttccccttccgccatgactgtaagtttcctgaggcctccccagccatgtggaacggtgagtcaattaaacctctttcctttataaattacccagtctcaggtatttctttatagcagtgtgaaaataaactaatacagctccctatctcagccagctgtcttcaccagaacctcctttctgagatgcagagaggacctcccagggggcaggcacctttgtgcacccaactaaagcctctggcccccaggttccatatcccacatcctgccagctcctgggagccaggcagcagcctctccaccccccttggaggtggctgggaacactggtgcctggctcagggaggctcctggaagccctggttatggctcactgcactcagccgtcggattaaaggggctcagagtgaggacagcctgcacggctgggcctgctgggctcccctggagcaaagccaggcagcccttccttcctctgggctggccggtggggcaccaggcagcttgaaggagctgtggacagaaaacagaagctgagttggcctcaacctttccatccagctgccacatagggcagggctcctcgggagctggaggtggcctttcccaggggttggagcccctggatggggtgttctggcccagcccactggggtgttgccctgcttggcggacagcgtcccacccgggtcttgtttagagtgaatcacttggaaagagacctgtaactgtatcctgcaggaaatcacaggctggaagccagaaagaaaccaggtcaagcttcatggaatcaggccaccaggaagaaaggcaaggagcccaacatttatggagtgtcttctccatgctgggcacactcagcaaatgcaatgtggcccttgtccagggaggtcgggctgaacctcgttttgcaaatggaccaagacgataagtgatttgggggcggtttaaataagcagcaggtggcatagctgggatgcaaacccaggtgtgcctcactcaaagatcgatcagtacaccaccagtcacacccaagtccacccattaataatgcggaggtggcctctcctcaccggcaccctcctccaaaccccaacttaggagcatagcagcagagagcatggaagctcttggaggcccctcgctatataaggtggtgtagtctgggggtcaaaagcatgcaacccagctttgagtcctgtctctgcacctatgagctgtgtgacactgggcaagtgtctgaaatgagggattctgcataatgtttaggaacatagcaagtgtttcgcatatttagctattattattatcatcagtatggatattgaatctcaaagacccagctggtggcaccaggccttcccttaccaaatcccctccctctaaaccccaaccaaggagcaggtttcccagcaggttgcagatccctcaggacagctctgcagagggagtgagaccagcaagagaggaggggctcagtgattgaaaataaacactcctcagcagaccacccacttcatctcccacccctcccactgtgagcggagcagcggggagagaacacagattcctccacctaagttgagtcaaggcaagcatgtttctctttttcagaggagaggagaccacgtgaagtcaaacacaagcaccccaaactacctccttgccccatctctcaggtgcagccccacctgatgcacctggggaggagttaagagctgggaaacagatcatcacaggctgggaagccagaggtgggcacggagcacacagaggggttctccatgcaaagacacatgcacactcctgtccaatggctcctcagctcaaatgccctggcctgtgggtgaaccacgccaccatctgaacttccccccaggacagggcccacatggcctgggggactctaaaaaagaacttggcatcagatcctcttcaggtccctagagactggacccttcttatagctcctgcctgcgtcgcacccagaccatcttgggatgttgaaagtccactgtatttggaaagacaacagcaccttttcctctttaatcccccactggcctcggtcagaatgcagagtttttgcaggtctctcagtttttgttttgtttttgtttttgttttgagatggagtcttgctctgtcgcccaggccaaagtgcagaggtgcgatctcggctcactgcaatctctgcctcccaggttcgagcaattctcctgcctcagcctcccgagtagctgggattacaggcacgaatcaccacacctggcttatttttgtatttttagtagagacagggtttcaccatgttggccaggctggtctcgaactcctgacttcaggtgatccgcctaccttggcctcctaaagtgctgggattacaggcgtgagccaccgtgcccagctaggtatctcagttttaatactgaacccactctccctccatggaagcgtctgtctgcgtactctgaagaccccatgttgcagccatgattcctgccccctcttagatgttcgtaacacggtggtctcggaacaccccctctccagcagctcccaaccaacacccatgggtgccatccaggcagcaagctccactcaagctggggctcaccagaacgagtttgcatccaattctcaagcctcaactcttcagctttgtttccacccttcaccactccccacagcatgcaaataataccgcattttatatggaaaacactaaaataagatcacaccttttaaaagatatttccacctcgcagcctgaaatcagacttcacctttctcccattcctcacaaccaccaggccagccccctcccctcacacacgcgcatgcacacacacacacgcactcacacactcacacacacccgtttcactaccagacttccctaagccactttaattgaaaaggcatgatttagactaattgacagcagatgggttcggttgcaaaatgcagagaagcatttgttgaacatgatttacagcaacgaggcaaaactttctcctttttatatctttctctgagctccatggccagaacagctcagcagaaatgagaggagaaaaaaaagtaattagtgtttaattttttaacaatttttaactccctttttaattgctttacataaacctgtcctagaattttacagccttcaaatctctgtctaagtctggtccttgtttctggttttaattacagggaggcttgtctggcacattaaattagaagaaaaaaaaaagcacacacaatttcagaactattttgctgttggactctcgactgaacatctaatatttcagcgtgcgaatgggaaggcactgcccgggagggctttggtaggagcagacgtggacccaagggcttctgcagcattgttgcatcgacccaaaactgtctcttaatgttacgaggagggaaagagcagtcaggatacagtatctgatgggccgtagtggcccctggatgctcagcactgctttgaatgcagctagtttcctagaacggctgtgtgcagacttttgcaggctttggtcaggctgtaagctcttatttttaagccaggccatcgatctcatgctcacttctcagcagtcccttttaagcaggatagtaaccagaaagaagcactgtgtggagaataccaagcggatgggtctccccagtgcagggttcgtacgaggggagagtcagggcagcagattcagggcacacgatggaggaccaggtggccatctgcatctgagtctgcatcttccttgcagggagagagggcttgcacctggacttgtatgaaccaatggaatcttctgtgctgtccaacatggtagccaccagcatatatgtggctatttaaatgtacatgaatgaatattcaatacaattttgaattatcttgctcggttgcatgagccacatttcaacagctcaatagcctcaggaggctagtggcgacgtaacatatccaatagcacagatatgagacatttccatcaccaaggaaagttctattggacagggatgccctagacccttgctattgaaagtgtgttctgtggctaggccctctgcatcccccaggagctggttagaaatgcaagatcacaggcctcacccaggcttactgactcagaatctgcatggtaacaagacccccagtgatccaagtacacattatagcgtatgtcccgctagctcgtgaggatgaaagtctcagaagctcccccaccccgtagcctagaataacctttccaacttgcagattgcatatgaccctctgggttggggattatggtcaatttctcctttttcagcttgtttgtgtcttctggatttctgcagttacctttacttcctcaaaaaagaaagcctggccaggcagagtggctcatgcctgtaatcccagcactttgggaggccaaggcaggaggatccttgaaggccaggagttcgagaccagcctgggaaacatagcaagaacccccttctcgccaaaaaagagttttgaaaactagccaggtgtggtggtgtgtgcctgttgtcccagctactcgggagactgaggcaggaggatcatcacttgagcccaggaggttgaggctgcagtcaactataatcgtgccactgcactccagcctggggaacgaagcaagaccttgaaaagagagaaagagagaggaaggaaggaaggaaggaaggaaggaaggaaggaaggaaggaaggaaagaaggaaagaaagggagggagggaagccagcctaagaaagttattttactaataccatggttttgtaaaactttgttctaccggtaatacaaactccctgtctgcagtcaatgcaagggctggcatccatgccacggacacaggaacctgctggaagccggcaggggaagaaaggtcacatccctgaagcagcagctgcctggggcctggagcagggcaacggggcgtggattctcttaaaggtgagtgtgcaggcagggggagggcggaaagatgggggcaaggggtggtgtgtcataaaatgtcctgaggacataaactttgcagggcccagccccccactcgctgcttgcgttcattagcacggaggccgcagaccccctcggcagaccctgcctatgcctgccctgggctcctggaggactcctgctgggggccggagggctgcctggcgccgctgggcgagcaacttcagggatggagccaggccagcgccggctccccacacatggtcattacctcccgaaaacccaggagttattacaattaaaacacgttgcaggggggagtgagggctgggggaggtccctttaggaaggaacactgggattagaagaaattagagcagttgtcttggcaacgcagccaggctgggcctaccctgtgattatttcaatgggaacagcaggatgggggctgagtggggctgggatagggggtgctggagacccatgtacccagctgcatgggtgagagctgtgctctgctctcagaatgggactcagcagccagggaaaacgctccccagggtgattcctgccggctgtcctgttctctgtaattgctacttatcccgtgaaacactgagtagatggccctctgtcctccagggagttcaaaccccagacctctgtgatccttttctttttaaaacagaactctcccaagagggcccccgctctcccggcttcatgggtggaaatggcccggcctggtttcctatcagttcaactctggccgttcagagccgcaggtcaaacccaaccatccctttttctaggtggcctcgaagcaaggtggaatagaaagcacaagaggtgtgcatggcgggagaggcaggagagctgggggagtgaaaacgttttggaagtaggcccatgataatgagcaagatggaatctgtgcctgggacacctccaggcaccagcacgggattggggtctctacggaatgggaatcccggtctggcagagctacagggcctgcgaaagagaaaacagtaattagttctccatctttctgcttgtctcagcagccccgagcatgtttggcagacgggcgaggagaacctgtttggaaaccactgggggagaagaggatggggtgaggggggaagggacaggaggaagaagaatccagtctccaagcttccgggggtagttcttggcaaattcccacatccccagtctcatttcctctggaactaccttagggagtctaatagcagagagaggcctagaaacaccagacccagtacaccagaagtttcaggtgtaccaggtgagcgttccatgtggaaggttaactggaccggaggcaaggccccctcagaacccaaagctggagatctctgagctgcctaagcccagccaggagatgacatttaggaacattctcttcctagcctccccgtcccttttgaaaactgatgatttccaacctcaggtagccactgtcggttgtttggggccttcaggagagcttttcctatttgtatgtgcaaggtctgaggtgttctgatggaaaacacatgttcttagaatttggcctaagtacaagacttagccactgattccacgtgaccttcagcaactcattcaacatctgtttccttatctataaaagtatcatctaatttacagtgtcatcatgaaggcttgaaataatggacttaaaatgcctagctttagggtaacaagtcttccccatttgtctaggtcggacgggttcccaggactttcaggtttaatgtcaggcagtcccaggtgaacgggacaaggtggccaccctaccaactactgagtatgcatgaagtggtgggggcggggggcagctattttatgttggggtcttactcctttgtaaaattcttgacacattctgtgtatataagtgcaaaaagtatatatacatacacacatccatatacatgaactttccagagataaactgggaggcaattattcgcatttcaaaaaaaaaaaaaaaacctccacctggcaaaatgataaaatccagcatccttctgtacaagattgaggcagagaaagagactgtgtgtgatggaaaattcagagataataagctgatggattggaaagcaatgagaaatcatttctgagagcctttcatttctgggggaaaccccagcactttcagaagattctctgtgcccagctttgctggactctctctagctacagagcccagtgcacctatagcatggctccttcgtgcattggcaggagatcaccagcagccattggtctggggaagtgctgtcaggctgggggtcagaggagagggtcaaaagcctccatgatgtgctccaagttctaacttggcattgcttttcatcacaggagaactctgtttattttattttattttttttttgagacagagtttcactcttgttgcccaggctagagtgcaatggcgcgattttggctcactgcaacctctgccacctgggttcaagcgattctcctgcctcagcctcccaagtagctgggattacaggcacgtgccaccacacccggctaattttgtatttttagtagaaacagggtttccccatgttggtcaggctggtctcaaactctcaacctcaagtgatctgcccgccttggcctcccaaagtgctgggattacaagtgtgagccaccgcacctggccctccgtttatttttctaccttccccttggttcagagggttcaggctgcccagcttttatcaactctaaaaaagcttcaggtggggagttcgtgcaccaatcaaaaacaccagcatcacatcatcttgctggagttttttgtcgttgttgttgtttttaaccacctagttcttggaacaacaggtgagagagaataggagggaaaggaagatgataaaaagatcgcaataccctccccattcccccagcttcaaaactcagaggcgacggctgaataatgcaggcagcttggtctggtgggggatcttcagaagcaatggaatcacgtggagcaggccaagctgagaccctaacccggctccaccacaacccacctcagcctgggctccagggtctgcaggtgcaagccaccagctgagcaaggggtaaggggaggtgcaatgagggccttctggctgtcctcccctcttttgtcctcccctccccaccaccacctgatgctttcaggtgaaacctgagccatgtggctacaaccacaatcagtttaatgagcttcattcactcccagtctaaatcgggaagaaaaaaggccccgctggaaacacatcctgtctcctcctcggtgaggtgacagtggggccgggcacagcaagggggaaggatattagaaggtgctgaaaagggagagctctcccttctccccattggagggatcaaagcctttatttaatgtggccagagcagatcacagagcctccaggagtgctggctcctccctggcatcccagcctccctgaggctcataggctcacgtggtcccagattccagcaggccagccccatggaggctaagattgcatcctagggagcaaacggtggctgccggaagtagcccaaccttgccagaccacataaggctggagacacaggcagcaggatggtgtgttgagggggtggggaggggcttggcagtgatgcctgggtttatttcttggattgttattttggtgagaggtgccctcaacatcttggataactaaggctgggtcctgcatggaagagagagctgaaccaaaggttatgtgaccacacaatgtccccccatctctatccgagcctatttctgccatcgcatttaccaaactactttgacatcctctctttccttgcccctcttcttctctctctttcacctcttagaaggcaagactgagctttttttcgtgcctttgtatcccatgcagacagtaagcactaaataaatgtttgcttacctaaatagattctttacagctttatcatgatccatgtcttgggagagaatctccctggccgacaggccaaatcccaggagtccagacagagcctccaggcctcttcctacctcttgcctccacttttctacacatttcgccaaaggaggctgggaactcgctccactactgtgccacaccaattaacaacaacaacaaaaaacacaagccatagaggaggaaaagtagcaaaggaaaaaaaaaaaacagacaaggaggaatgaaatgtgcatgtgtacacatataatacgagttagcctatcccaaagccccctggacagaaaccaaacaggaaatcgagaatcattaccaaatgcacttccccggctcgcccagctcctggcccccaggagtgggtcaaggatgcgcagacgcagctcccggggcctaggagccccgggagggcggggctttgatggattgattggcatttccttcccccgctaccctcctgacctctggggagggcgtctccgtggatggctggtgggatggggcggaagcctcttgttgcggacaccgcccgggagcagcggggctggagctttgccactcaggcctcccacggtgctggagcagaaggtgaccggcagctggcctccctcaccccactccacagagagctgtgtgatggcccgggctttgaggtcaagaccttctgctcttaagaaaacagatctgaaattttggcatcaaaataaaatatgtgcagaggaaataagtaacccttggagcgcaaggcaggccataagattgaaataaaatgtccaagcagaaaccagagctaggtggccataggttcaagttcatcccggctgggtcattccttttgctctgagctctatggaggactgaacccttgctcggtgcactctgcctcagcaatccatcaagctgtttctgtaaaggaccagagagtaaatatttcaggcgctgtggaccatctctgttgccactatgcagctctgcccgttgcatgaacggagccacagaccatacataaatcaatggttatagctgtgttcccacgaaactttatttataaaaacagacagctgttcagatttggcttatgggctatattttaccaacccctggcgtagatcatgaagacaacagaatgatataatggttcaaggatatgggctttgaagtcaggcaaacccagttccaatctctgtccaagacttattactgctgtcatcttgggcaagtcacttaactcaatcaagctcaatttcctcatctgtaaaataggataataatgcctgcctcaccaggttactgtgatgattaaatgatctaatgaatgtaaagtgcttgacactcaataaatgctggctgttaatcattctcattatgaggagaattaagtagaattgaggggaggtaattttgagcctttcactgttagttactgctattgttactggaaagctcctgcacacctgagtaatgagggctggcagtgtctttctgtgcaaaaatttatttcctacaatttaatattccacagattcactgcatgctattaagtcagtggttgcatattagaatcatctgagaacctttttttttttttttttttgagacggagtctcgctctgtcgcccaggctggagtgcagtggcacgatcggctgtctgcaagctccgcctcccgggttcaggccattcttctgcctcagcctcccgagcagctgggaccacaggcacacgccaccacacccagctaattttttgtatttttagtagagacagggtttcgccgtgctagccaggatggtctcgatctcctgacctcgtgatccgcccacctctgcctcccaaagtgctgggattacaggcttgagccaccatgcctggcccatctgagaagtttttaaatctccttgcccaggctgcaacctagaccaatcaaaccagaagctctgcgagtaagacaccgccaggcatcactatagtttaaaactccctggatgattccagtgtgaagcctaagtggagaaccactgggctacgtagctgaaaagaacaggggagagtccttttgttccttactactcaagagggcgtccagggaccagcaccatcagcatcgcctgggagcttgtgagacgtgccgaatgtcaggccccccaccctagacctgctgaatgtgaatctgccttttgacagaatccccagggactggggtgcatatctagtttgaggaatatagctgttccacaggcacccgaacttggctcatgagcagaataacatgcaaagttttaaaaattactagacttcaggccaggcacagtggctcacatctgtaatcctggcattctgggaggccaaggcaggcggatcacttgagcccaggagttcaagaccatcctgagcaatatggcgaaatctggtctgtaaaaaaaaaaaaaaaaaatttaattagccaggtgtagtggcacctgcctgtagtcccagctactgaggaggctgaggtgggaggatcgctagaggccaagaagttgaggctgcagtgagccatgatcacgccactgcactccagcctgggcaacagagcaagatgctatctcaaaaaataagacaaaagaaaaagtaaaataaaataatttctagacttcatcaccaactcactgaatcaaaatcattgttgggtagcccagggattggtacttttccccaacgttttatttgaaaaatttcagacatacagaaatgttgtacccacatacttaccacccagatcctgtgattgtcaagattttgctacatgtactttatcacaaatctatgcgtttatcctccgtttatctatccatcaatccaactcattttttcaacgcatgtcaaagtaaattgcaggcattaggacacttcatctctaaacacttcagtgtgcacatcattaatttttaacaaggtctgtaattgattcctgggctgtgaacccaacatcctaccttgggcattcaggagttattaatctagtgacaatctctctgtcctgaggggacagtagctaagacattagagaacagtcactcaccactgtctgtattctatctcttagtatttagttaacaatggcattaagtgtctttagccatgtctcctaaaccttccctggtgtttttcctccaaagaaatatctccaggcaaaacactctacagtctttccatgttccctttgtagagactaagctgagtctcccactgtagttatcaattctgcagccaacagccttaaaggggcctgagagacaggatgctatatcatctttgcttctgaattttggcatatcatcggtcagggtgcagcaatttcacctacacatctggctttccctccgtcttgggttttcttttgacaagcacctgtctaatacaaaaatccaagccctgtcagggctgatgtgaactctaataagagatatttttctggctaggtcaacccaaaaaggaggctggccctaggacacaaggcaggatcactcattgtgatcaacaattcaagatcttttgagaaagaggctgaccattccactactgcacccagatttttttttttttttttttttttgagacaagttcttgctctgtctcccaggctggagtgcagtgatgcaatcatgactcactgaagcctcagcctcctgagtagctgggcctacaggtgcagaccaccatgcccaactaattatttttttagagatggggtctcactatgttgcccaggctggtctcaaactcctggcgtcaagcaatcctccctccttgacctcccaaagtgctggaattacaggagtgagccattgtgcccagcctgcacccagctttttaggactcttccagaatccctgaggtggggctgcagttagtaccaattcagtctgtattcttctgctcctccccaaggtacttggatagccgccaacgctcatgggataaattaataggagttactgcccctaaagaattgcctaaccacttccaaatgctctcttccaacagtctaggagagggctgtctcagagtctgaacacacacaagccccaagtcgctctatgtcatagatagagacagctgggtcacaaatagtgtcatacatcagcatttccacctacaaacatgaaaagacacatgggctcctcacttccaaccttgctcactattttgcaggccacccactctctgtttgcatggggcctctaaccttgaaacccgacaccctcctttcaggagccacccatgtttaaacaaataaataccccaaagtaacccactccctggtggtactcaaataaatggcccaggaaggaggatggggggagggggactcctgggcctcctatgccactggcctgccacagagcatccttgggccactgctatgcacagggccacatagagggacagcataggtgaggggagagtttgccgtcactggaattcaggaaagaggaggcagagggatggatggtgtccaatcaaagatgaagatctggcccagcatggtggctcatgcctgtaatcccagcactttggaaggcagaggcaggtggatcacttgaggtcaggagtttgagaccagcctggccaacacggtgaaaccctgtctctaccaaaaatacaaaaattagccaggcatggtggtcggcatccgtaatcccagctactcagggggctgaggcaggagaatcacttgagcctgggaggcagaggttgcattgagccgagatcgcaccactgcactccagcctgggtgacagagtgagagtctgtctcaaaaaaaaaaaaaaaaaaaagaaagaaagatgaaaatctttgaaacatgcgcggagattctctgtaactcccagttactcaaccataagcctttaaattcctctggccagggagggagagctaagaaccatttggtgggtggagaggaacagggatcagttatttgatgagtcagaaacgcttaaatgtagttccgagactctgcagttctcactcctgcagtgagaaggggaggggtggagagaagtgggagagggagacccacaagtccaaaaatctccttgtctctggttcagtggcgagaaccactgaaatgtctttgtttcatggaacgtggaaagctaggaataaagtcgctgctttgtcacgagtcagttggtcaacggagttgctgctatattatttaggatattttaaaatcctaaaaaggattttaaagcataaggaagaagatgacaatggtctgcttcagagctgtggacagcttcctatgaaggaaaggaaggagaagagatgttctcaagggttggcctagtcagtttatagatgagcaaggaaagtgtgaactagattatactagaaagctggccccatccccctaagtgtgtaaggaagtgaggaggaaaaaggagaccacgtttcaaaaataaacacaaaccccaaaataaacactgttaatggaagtgactaatcaagggtgtgctgaacttggtggttattgataagatacagggagaaacgtacttggaaaaaataacagatccccccttaccttttggtaaataaagtgttggggagaaggtggggggattagggttcggacttggttcaatgctgcagcagaggtttaagacacaatttctcaaccttagcactaccaactttgaaggctggatccagacagttgtgggggcttgccttgtgcattctaagttgctttttttttttttttttgagacagggtctcactctgtcacccaggctggagtgcagtggtgtgatcagagttcactgcagcctcaacctcccaggctcaagccatcctcccacctcaacctcccaagtagcagggactacaggtgcatgccaccacacccggctaatttttttgtatttttcgtggagatggggtctcgccacgttgcccagactgattttgaactcctgggctcaagtgatccacctgccacagcctcccaaagtcgtgggattacaggcctgagccgccacacctggccactgtaggatttttaatggcatccctgtcctttacctaccagatgccggtaggacacttgcccctagctgggacaaccaaaaatgtctccagacatgcaaacaaccgctggatgggagtagggggacaaaatcacccccacttgagaaccactggtttataatatggggcatagctcctctcagtgagagatggcttaccatgacttagggcttggcctaagcaaaatttgaggctaattcagcatctgtactgcaggcctagaatttgtcattctgcggcacttctcactgtagcctgttttccccctccagggcctctggccgctctgcactcctggcagtcggggagaaaacaatgaaaggatgtgccagagcccccatgcccacctttggcatgtatggctctgtgggtgcaggatgggtgagtagaggtgccttcctgcagggggagtggagagacagcaggaaacaccatatctgcctggaagctgcagccccgtgtgaggccacaagtctagtatcgtaacccctggggatggatttcaacccccactcaccccatctggcctggcacctgtgggcattatgtaaaccgcagccctgattgtacgatgactcagctagaatgtaccctttgcagttgtcctcatcctctctcttcgtatcactgaagaacagaagaccagagaggtgaaaagaaagtctacagtggctagctgtttgggtccggatgagtttcctcttactgctgcaacaaatggccataaacttagcagcttaaatcaggacaaacctattatcttcaattctggagattagaatttcaaaatcggtctcagtgagtcaaaatcaaggcatcagcagggctgtactcttacataggctctagaggacgatccgtgtccctgccttttccagctttttctaaaggccacctgcattcctggcctcatggccccttccaccatcttcaaagccaggactacagcatctacaaatctctgactctcctgcctctctcttaaagggactgttgaaattaccctgggcttaaccaagaattatctccctgtctcaagaaacttaacttgattacatgttcatggattccagggagcaggacatgggtatctttggggaccattattctgtctaccacatggacaaagccaatactcagctcagatttccaattccaagtccagtgggtttctgcttgggactgcactgagagcaagaccatacgcacaggattgcacagaagagctggcattttggcttttatgggagaggtcttctcaatggtcctccttaaacgactccaataagaatcagaaataaatacaagagccttctctttttttctttttttctttttttttttttttttttttttttgagacagactctcactctgttgcccaggctggagttcaatggaacaatctcagctcactgtaaccccagtctcccggactcaagcgatcctcccacctcagcctcccaagtagcttggactacaggcatgtgccaccaaggccaggctaatttttgtaatttttttagtagagatggggtttgttatgttgcccaggctggtcttgaactcctgagctcagacgatccacctgcctcagcctcccaaagtactgggattacaggcgtgagccaccatgcctggccctgagccttcttaccacgaaaacagaggccgaaacctgtagatgtctactaaggccgtcggtcattaaagcaattattgccagccaagaaagccttcaaggcccaccgcaatccagataggctagccaggaacctccatggagtgagctataacatgatggggttttattcaatggaggatttgtctactgaaggagggaggaacacttgactgagtcaactcaatagttcaacaaatgttctttcagattctgacctaggtacagaatgccagtgagaagtaagaacagccctgggcctcacaacctggggcagtgggtgttgctctcattgtcttcactttataagtgaagaaacagacttagatcacaagggcaagagcaaaggagtcagaattaaactcagacctgcctaaccctacaatttgactcttaactgtgtcactatttggaattccatgggacctgtattagtctgttctcatgctgctatgaagaaatactcgagactgggtaatttatgaagaaaacaggtttaattgactcacagttccatatggctggggaggcctcaggaaacttacaatcatggcagaaagcacctcttcacagggtggcaggagagagaatgagagccagcaggggaaatgccataggcttataaaaccatcagatcttgtgataactcactcactagcatgagaacagcatgggggaaatcgcccccaagatgcaatcacttcccaccgggtccctcccacaggaactacaattcaagatgagatttgggtgaggacacaaccaaaccatatcaggacccattctataaaagatatgtaggaagtgcttccccaggagtaagggtgattacttctacctggggaaggttaggggaatgtttatcagggagatagtaacactagcaatagctaacacatgagctggatgtatgactcaggtcctgtgctctgagagctacatatattaatgcatacctccctctcccacaaaaaaagaaaagaaaaccagtgaggtcagtactactacaatcttcaaattatataggaggatgctgagatgcagagatatgaagtaaacagccttaaatcacacaaccaacacaaggtggggctggaattgagatgctatcccatctccttcctctgagcattagaaaggcatctaggaagggtctaatcctgagctggaaaggcatccatgggctctctgtaggggctcagaagggctagacagccagccagctggaaagcaatgcggcatctcatgcatttgagcatgtacaggtcactaatggctgtgcacaaaaaggaccccagcaggaagccatccactggcccctggaccaacactaccaggatcttatttgttaggagggccagaaaaacagagctcgtcaatgtgcaagtacacagctctctggctgcttccattggtctcaaagttgccttgtccagaggggccattgactatggtgcattttaaggaggagaagagacatccaggatgccaactggggtccaggagacacagccacctgtcccacgagctccagagtgagcctgacatagggcaagtggaagccactcctcagacttcaaattcctcttgcaagacaaaggctaacatagggaagagttgtaaaagacactgtttccagaaatcctctgaccacccacaacggtcttggcttacagagtttgcagtgacctaatctgtatttagcaatgctatccctttggtggaggagggtaaagattacccaaatcctgtaagcaaagcatcaaccacatcctatgctgtcttcactgacacacaccactgtgctgtctaggaatcaggacaatcgtatgccactgtgcacccaggaagcctgacctgctgtgtcccgagtctcactcaacaatgcacactatggcggcaggtgttcactgcgccggggatttttattgggtggacttgtggaatttaaaatctcagttgcctatctcaccttgaacaagtaaaaatggtttcagttgcttctaccttgccccatttaagttttccccagagatgggctgctgagcagagctggtggggacgtgggggatggttatgggcagtggagagacagggaaaggtgacaccagcctacctggtctgtcttgctcaaagccctttcctttccctctccatctccccaacccacgattcagaaagctgcagtagaatcggcttccctcagctgccctgatgcgttcctccccagcgatctgctttctacaaaaaaaaaaaaagtgttctaaatagagcggaactgagcatggggccgcagcccggatgaagtcttcccctccctggagagcccagcgtctcacatggaggctggtccacccccagtgcctcttactcaaagcatttttgacccgggagcacccgaccttgactgagtgcacaaagctaccacaaatggattttgcttctgcagcattttgcccgggctggagccttcctccctcccaggcatcccagatgccttctctggtctcctctccttgcatctgcccttacaggcatctaggggatcctattccaggtgaggacttaaagttctgcagcagtcagagttctccaataacttgcctggtgagactggatggctcaattaacccaactggaccgcagcattcccaagaccgaggtctgagaactaggaccaccagctctctctcacaggattagagtgttgggttataatttttaagttagagtctcctgttgctctcaagggggcctgagcatcagtctgggggtgggtcccttgacattcctccttgattctggaaaagtctacccaaagctcatacccaccaggtgcagagccagcagcagctttttggaatcagccatggcacacacctggttctgtgcatttcacccattaacacacacatcaagaatcattccaatgccagccaggtttattaatgaggttctcacaccctctggaataagcatcctatccttcagtcctcaaaagacagggctcccaaaggggagagtgactggtggtttctcttaccaccatgacaccaactcaacccaggtaccaagcctaggccagctggccctgtgacagccctggaccatctttggaagaagggtggaggggtggcaatctggaagggaggaggtaggcaagcagaggtgggaggactcaaggggaagtcatgagtcccccctctccatccccacttcctggggcctccactgagttaaagcataaggaatctgaagccaaactgattgtatgaccagtcaatgagtcagtaccaccctgctcttcatggcctctctgaggtcagcacctccaggatatccgttcacccaaccaggcagaggcaaggagtttagaaagtgaaattaactatggggtatacctccttccttcgccatcccaacacagaaagaaaatagagggaagaggggaaggaggggactggagagatagcttaaagtgtgtaaacaggaatcctggattatacaatccattcataaacaagaataacacttgttcaaagacggtttttcggctttgttttttgcctcctgtcatgcacttctgagctaggaaatatccgttcttctctattcccttcctctccagtctgtttcagagcaagaagaaaacttaaatgctgaaacaaggtatttttccccctctggatgaactgttttacaataagctacctgctggggtcaggaaacgttagatcagtggctttctgctcacacaaaaactcacacagggggtcaggctgaagactgcccccctcgaccctccacagagagatggtcacccacatacaacccctctggatctgtgccaccttttattggaaacaatttctcccttctgcttcaccactttgccccttggttctcagtcaaccaatgctccgaactctcctgcacgctggaggggagcaacccccagccagcgcacctggggctctgtgtccacaggctcatgggaagttggaaggtgaggggtagtgggaagaagacacgggagggaaggaaagagctgtgccccatgcgccaataggaaacatatttcctttactattaagtgtgttatactcagaagagggaggaatgatcaaaatcaaaataaatagccagcggaaataggcagcccctccctgggaatggtaattacacaggatggaagtttatccaaacactggagaaaaaatggttcctgttggaggacagggaaaggaacgttccttactggaaaggaaatttgtttatgacattttatttgctccttattttttaatgcgcttctggccccatgtcctgtaaacagaccagcttttccattctctggcagtgccaggagagccaaagaccaaacaggcggagctggtgccaggatcctgggccactcaggtcctacaattacaagagccgaggcccaggccagggggtctggaagggggccttgctggcctctgcagtatgcagggaagggtgtgatttgaaatctaggtgtggaaacggggagaaggttctctgcctcctgagctcccccgaggcttggaatcagctctctctctgccccagtagagggagaaacaggaagggcttcatgcacccaatgtatatgtctcatgagtgttttgcagggtctctgcagtcggtaggtgaaactgacagattctggagagaacttggcctttaggaaaacgcctgactgatgttaaagtcacgtgagactgatgtggtgtgcatggtgaccagaaggagagaccattgagtgccagtgtctgcagctcagctctgtccccaatcccaaataaaaccgccacggccagcaagagtcagcgacaccttcccacagccggacaacagagacgcaatggcagaagttcacatttgacgtttcctcttcccatctgggcatagagatcatctgaggcagagttatggcagacgggccctgatggcgccatgttcagagtatagagagagctccgacgccacactgcttgggcgctgtgctcctggctccgccctaggagctgcacctgtaatatctcggccaaactttgcaatcacccaaggaagcagtttaaaggaaggaaactgaggcacagaggggcttagtcactcactcaaggttacacggctaggggctggtgaagaagctcaggcccaggcactctgggccagagctgtcgtcctccaccatgactccatcctgcttccctttgagagccagtaagcctgggcagaagtcctcaactctctgagcctggtagtagaaaagcactaagcctgcacacccaggcctgtgacaatggggcatccagaaggccagacccacgggcctcaatggccacaacagaggccaataagctgcacctcagtagccccacagggggttcagtttgcatggcaggagctgcaagtcctccccagcactcctgttctccaccccctccttccatggagttggacatttcccagctctcttgcatccaagtggagccttgggatcaattcctgccaatggaaagtgagcagaagcgatgggtgtttcttccaggccaagatggtcaaacaggtgcatgtcctctcacagcactttctctgtgttcactggtagaagaggatgcctctgaaggtagtgatatcctaaaacagagggaacctgggtccctgaatttctgcatgaaaaagagcctccggtccctactattgctaagtcacatttaactaatgtgtaaatgagaaaaacttgtcaagtgaaggaactgatatatggaggtgttttgttgcagcggcctttggtgactgatacatagagaaccacaacactgcccttagggacaggggcctatgggtggtctctacagcaagtcagtacacctccctcagcccacaaaacaaggtctctatccttctcccaaagccactgcgagattccaaggagaagatttacaaagagcttgaaaactggaaagtcccataaaaccactgaacttcattatttcctgaatggcctgatctttcttggctgaatgttatatcatttctctcatgtctgaagccgtgcctagtgactgtggttcacagatgacaacctcttggtccaaactcttattttattggtgtgtatgaattaagaatggggtgagctttcagtgtctctcgtctcccaaacaggcaaagcttctgccctacatgtcagttctcttcaatcctcctttatctgctccacacacccccataccaccacccccacccccacccccacaaacccccaggaggagaaatcaggagtcaagggagacagacttttcctcccagggcctgcttgcccctgagtggtgccttttctcccttggcctttggtcctcaggtggtaagaccttgaacctaggtccagttctcatggcaagggatctgcctattaacaccgaaggtctctacctgtgaggttggatattaatgggcaggtcccttttgttttttctgtagttctccctattagacagagtgaaattatttggatattaatgggaagatccttttttttttaagttctccttattagacagggtgaacgaaaccctagaaattttgatctaaacttttgaactgatatttttatttcccaccctaaaaatgaaactagctcatggggtaactggcaaaaatcagacataattctattttcaggaagagtttctacatggaaaccaaccaatcaggcaacaaacaaaatttctctgctgtttggaaaacactttctttctttattgattttttgagtcagggttttactctgtcacccaggctggagtgcagtgactcaatcacagttcactgcagccttgacctcccaggttcaaccgattctctcacctcagcctcccaagtagctgggactacaggcatgcaccaccacacttggctatgtttgtttttgtttttgtttttttaattttgtagagatgggggtctccctatgttgcccgggctggtctgaaactcctgggcttaagtgatcctcctgtcttggcctcccaaagtggaaaacactttattgattactcctgagcaagcaaaaaaaaaaaaaaaaaggcaaatttggtggtacacacaataacaggttggtaataggaaaagtcaactcaacatcatttttgtacatcctaccatgtaaaagccatcatgctgcaacttcacaagctctgaatttcagattgtccatgaccctggttttgaatctcaaagttcacataaaagacttggtcaaagcaattgattactgtaaagtcttgtttgccgatgattaaatgagaagtatatgaaatgcccatcacagtgcttcccatgtgaccatggacgtttgggagcatttcaacgataaatttcaatgagtaaacaatgactcagtccctattcttataaaagagagagaaagagagttgggagagaagagggtgccaaaacaagtccattgtaagtgcagtaaatgagatactaaagtgctatggtcaaggaaggaagactgacatttttttgagtacctatgtcagaatatgtgagggagaggtcacaactggttgagagggaaggagaaatccaggacggcttctgagagaaggaagcatttgagatgagcctcgaagcattcgtaggatttcagtaccctggatgcccgatgtctatcctttaaaaaatactcctctgtgaagaattgccaaaggattaacgatcgtgctgaattcaataaaaaatcattactgggccaagcatggtggctcacacctgtaatcccagcactttgggaggctgaggtgggaggattgcttgagtggaggagttcaagaccagcctgggcaacatagtgagacccccatctcaaaaaaaaaaaaaaataattactggaatgtgcaagaaactttctgaagtaagcagttctagaatgtgagtagtgatttgggaagccatagtgccccacgtagattaataagatgcatcctgggctggcgcagtggctcacgcctgtaatcccagcactttgggaggccgaggtgggtggatcacgaggtcaggagatcaagaccatcctggctaacacgatgaaaccccgtctctactaaaagtacaaaaaattagccgggtgtggtggcaggtgcctgtagtcccagctactcgggaggctgaggcaggagaatggcgtgaacccaggaggcagagcttgcagtgagccgagattgcgccactgcactccagcctgggcaacggtgcaagactctgtctcaaaagaaaaaaaaaaaaaagatgcatcctggacagtcactggggtggaccaggaaatgggcacttagggtctggcatggagcagtgtgtcctgctgtgctgtacatgacagtgggtggctgttagcaagcaccacccatgagaccgtagcacccacaaactgcaatgttttagaatagcctggattacactgtggatgtttaaagcaaaggataaacaatgctccatctagtttagtttcactgcatctcctacttgaaaactgaatagactcggtggccatccagcccctcttgtcccgatatttcactccatggtgagtcacaagccctggtcagaccctaatggacacagccccaccttgaacagttcctctttcaggctgaaatcatctgctgggtatgaagactcagatgggataggaaagttaaaacttagaaataggcgtgctctgttcttttccaatgcttgtcattatgctcattttcgtgagggacaaggcctttgccttacacctgggacctaacattaatagtccaggagagaggatggaagggacccaggaggaccacctgctggagtcactaccctgagccaccacatcccgggcatcggcaattcctgggctggccagagccctgggcatagacagttctacaagcagaacatgtttttcacccttgcccttctcacccctccaaaacccagacctaagttaccgaaaaaggcgggacatagtgggaagggggcaggtgaaagaggaagaaaagacggagatggaaaacaattaaaaaaaaaaaaaaaactccaacagaactcgataacccgagggcccagtgatcggtgccgcacggcatacaaaagccaaaaggcaggtcccaggacgggtcaacttaagacttaatatttgcctttcactaagcaaactaataaatcccctatggttttagccacgcagagctcccagtttttatttattggtcaaaacggcaggcagggtttctttttttttcccctcccagccaccctgggggtaaatagtggtcccccttccacccctcctgtcatcagcctgtatgtctatttaccttctccctcaacaaactcatgttcagtgcaactgacaatgcgtgcaaacagctttgaagtattctttggtaatggacttcccggacagccctgtttttgacttgcacagccaaaggcaaagggagaaagggctactgcttgtcaggaaccagctgggccaggcaaggctgagaacttgatgcatggcaggaacctcagagaatcgtcaagaccaacccctgccccttctctgtcccttttatagatgagaaaactgagacccagagaaaaggctagagtgactcacatgtgacccggacttagttgaagccaagggcagggccggtgatcaggtttccagacccctcagtttagggctgtcttcaggcctccctccacctgttctccaccagcctggcatataagggtcttatccaaggtcagtgaccacttccaaggtcaccttgaaatcctttaaactgcagcctcctgagcagagggacttgtttcaccacgagaacctcctatctctcctgtcaacatgactaatattttcccacatgggtttccagggccgcttgaagaggatcaaagttctcctgtggatcaagttccaatgccatggaaaatctcacaggcgaggctgaacaaaattggggggtgggggcggtgtcggggagctaatttgaaatagttatgttcataatgaaattaaggcaagatgaaatcactttacattgcaccttggacaatgtctaacgtactattctaacatgagacctaaaaccccagcaaaactttaagacatggactcctagaaggctgatagcttatccatcaaatatgccagcatcgtggatgtcagaactattaatagaagaggctccagggatcgtgtggcccaaacccctcattttatacggaaggaattaagatgatgaggagctttctgagacaaaaacttaggtctctctgcctccctgcactgtgcttttttttttttttttaaaccagaacaaacatggggaagagggcaaaaagcatttagcacaaaatctcattaagaaattgacattcatggccacctgatagtgtatgaaacactctttaaaattcaactgcttccccatcaggctgggtatcactcagcctctctcatagtcctctctcccctgggctgaacgatcccttgcctgatttgaaaggggattcctgcattagtcagagataaatctagagaagagtgatgctttagaccacttcagcctctcaggttctgtgattgcatatggataaggagataagaaaagagagggccaggcgcattggctcacatacttcaggaggccaaggcaggaggattgcttgagcccaggagttcaagacgagcctgggcaagatggtgagaccctgtctctacaaaaaaataaaaataaaaaaaattacctgggcatgatggcatacaactgtgatcacagctactcggaaggcagagacaggaggatttcttgagcccaggaagtcgaggctgcagtgagctgagatcatgccactgtactccaacctgggtgacagagtgagccagagagagagagtgagagagagagagagattgagagaagagattgttgcctttgacataagatcaggacttcttttgaaaccaaagaatgaaagtagaacataaatgaagggatcatctgaaatgccttcatcttttaaaaaagaaaaatggcacccaaggaggtgggtgagcatccctccaatggtagcgaaggtagtgagaatcactacaggggcaaacaccaaggtgcatgatacgtccataagttcatctctaccctagcatgtaattccctccctgtggtcttgccatgccagatgaatgaaattatctgaaggcccctgttccggcactgcaaacactcatgcctgtctttcagcagagaagatggaggtcagatgccctgacaagcagcaacaacttcaggacgccacgtgatcctgaaaacctggctttttctagtccacaaaagaccctgtaatttgcgttcaggttgttcttaagaccaaaaaagttgggctggtgcaactatcccttacccactcccctccctacccccgccctgactaccacctccaaattctgctccctcatcccagataaaagtcagtgtctagaaaggtaagtataagctgggaggccccactccacactgaattgaactcaaaggttatctaggagcctttagagagaatgtacatacttagccccagtttacacacccttgatattttaaaggattctagagtttaaaggaatttcaggaagtcctctagccaactcctttgcttcccagacaacaccatcccaaaggttttagttcttgatctctgtctagcaaagatgcagatttggaatcctggctcatgattctacagacagcatgtgtatgcatgtgtgtgtgtgtgtgtgtgcttgcacacatgttacagtctctcttcctcagttcccagtggctgtgttagttttgtttcttaatgaactgttttgtttttcatgagaaagttagtttctcctttgtaagtaaggctgtattggagaggaatccctgataccttgaaggcctgccatgcccaccatccacaacactcagaaggacatggtctcagttggttcttcatacaaccctaccatcctggaaacaattgatttggtcagcattggtgcctgatccaatagcatccatctgtggctgcctgaaggccaacgaagtaaccagacgcaaaagctctgaatgcagattggctaaaccagtcaacagcatcagtcagttaatagtaagtaacaaagtagaggcatggtcgttgagtcacccaggagggtgaccagttttcccagtttgcccaggactgtcccaggtttagcactgaatgtccttcatcccaagaaaccctttagtcctgggcaaactgggaccgttggtgaccttcagctcatcacgatggcagaattctaaagtcaggggcagcgaaccctgctgctgaacagaggatcaaaacgaccatgatggtattgctcttgttatctttgaaaaccaactagtgcttctgcatctgctgaatgaccttgggctttttgaaaaggcttagctaggcagtggctgggactatttcctgtctaccttactgtgacttttgaataaaccaggatttatgaaggtaacgtaagtggatctctgttccttgacacctgtaggaatccaaggaatacaatgcctgtaactgtgtgtcaagaaaggaaggaaaaggtgaaaacccatcaacaatctgtaaatttcaatagctctaaacatcttcaagaggttctcctcaatcattttgtgatgaatctgagatgtccacaaggactccactgttctatttagaagacaccaaattcactaaatggtcatacaagcacagcaactgcaacatacaaaaactttaattatttttgcaaaaagaaagccaactattcgccttggaaataataatgaagtacaaatagctctgactctgcatttggacaaggatgaaccatgatagatatttagaaagggttttaaatcatgtgtatgttggctacagagtaaaaggaacagagaagactcaagctattgtcaggtgtgtatgtgtcatcagcacacactgggggaggagagtcctcactaagtgccacaacccctgatagctgtcagtctctcatgaagcaccatgatctggcatggactcccaaatgccacttgagagaaggtcttcacagcagactgtgcatctgtgtcacaaaacacggctgcaatgaacgacagtgttcattttttgcccttccaaatgtattcttgtgtatgatcgaagcaaagaaagttgaggatggagaacacgagccttcaccatcagttctgctgctgaagccttctccaacagccctaaggtccgagagcctgatgaacttctgcactgatccgtgtatcattctggaacttggtggccagatcccaaacaaatgagaagagttactattccaaggctgcttgcaacacacaaacactggcctctttacacggagcaggaacaaaaatttagatcctatttgacctaagtgtggttaactattcactctgtatccggctggaagataatggagcaaacaagaattgctgagtacaaaggcacagcagacatgggaggcggggggcaagaaagggtgtggtagaaagccctttggttccctgggacagggagggggaagagtctcatgagcagtagcagcagaggaaacactttccacaaggaagaaggacaaggtctgtcataatgagtcttcttcaactgtaggtcacctccagcgatgcatccctctgctccttcagggcaacacagactatttctcggtgtaaacgtcttttctttctacccaaatggcacctcaaatccagaggtctctttattctccaaaataagattattattattattattatttgagacagggtctctcgctcttttgcccaggctggagtgcagtggggtaatcacagttcattgcagcctcaacatcccaggctccagccatcctcttgcctcagcctcctgggtagctgggactacaggcacatgccaccatgccctgctaattttttattttattattattattattttagagatggggtctctctgtgttgcccaggctagtcttgaactcctgggctcaagagatcctcccacactggcctcccaaagtgttgggattataggcatgaggcaccatgctcagcaaagaattcttgatcaaatccagagctcctgcctctcaagaggtggtccagcctgagccaggtccttccaaggggtccaggtggcacgcgggggttctgctaaacttcctggtgggaatgtggatcagtccttcccatcctgtagaccaaaaaacagcatgagaattagattctagcttctgccctttcaggggctagcatcacattactgtctttggtttataatgctttagctgttgaacagaacatatacttcaaaaagcagtattttagttaagtgtcgggggtgggggtgggggaaagcctatttatacctctcaaggaactatccatccactgaatcatcaccaggaaccctcctacacaaatcccactacgaaatccagagctgattttttaaaatgccactgagtgcagccagtccagaggaagtggaaaattctgtttttcagcaggtcactattatttctgtgatttatggggcagggagcatgggggtggtagatcacccactttatagtggaaagccgaggcacagagggtgccggtgttcttgctacagaacagcagggctctggtccctaatcctaatgtttaggatttactaggaacttctctctgcttctgaaacacccttaacaataaattaggaacttactcagagtggatagctcagaggaaatggtaagacaccattaaatatatttatttttccctaattctgatagcaaataaattaagatggagttggactcacgatactttccttgatgttcacccctcaacattaccttccattactgagtaacaaatatattgaatagcaccaaatgccttcaggagagtgccctattttaaaactgatgagtcttagcagtgcaagtcaggggccttgtattagtctgttttcacaccaatataaagaaatacctgagactgggtaatttgcaaaggagagaggtttaattgactctcagttccacatggctggggaggcctcaggaaacttacaatcgtgacggaaggcaaagaggaggcaaggacctttctcacatggcggtaggagagagaagagcaagcaggggaaatgccagacacttgtaaaatcatcagatcttgtaagaactcactcactatcatgagaacagcatgggggaacccgcccccatgatccaatcacctcccaccagattcctccctccacgcctggggattatggggattacaattcaagatgagatttgggtggggatacaaagccaaaccatatcaggcctattcacagatacagataacataggccttatgaaagaggctgccctctgggtctctgattctagcaatcactatcaatccacaaggaatacctgggcaaccacaaatccatgcattcacaagtaccatattggattagatgctgtggatacaggaatcagccagacaggcaaaccccaccctcacaggccataatggagacataacatggatcaaaggtttccttaggcaagtatggggccagaggacagcaaggccttgagggaaatgcacgatggattctgggggcatttggaaaccaacaggcccccttctgtccctcaaaagacctgggggccccactcaacctggtgcaaaggaattctccttcatgagggctctagctgaggccttggtggggatgtgtgcagtggccaggaaacccagagagaagggcaccagtggccagagatgagataatgacactgtggtgttatttgataaacacacacacacacacacacacacacacacacacacacacacacacaggttttcgtcctaagttcctagctcataactcccatagcccttgttacagtcttttgctataatgttgggcctcaggaaacagaatccctctcctgccctccttacacctgctccaagacaggactctaatcttccccacctttctgactcatgagaccctccccagagaggaatctgccctataccttggggaaggaatgctgacgtcatgaagcttccatgaaaccccaagaagtcagggttcttcagggagcttccagatagctgggcacatggaagttcctggagggtggagcatccagggaggacagggaagcccagtgccccttcccccacacctcaccctatgcatctcttcacctgtatcctttgtaacagcctttagaataaaccactaaatgtgtttccctgagttctgtgagctgctccaggaaattaattgaacccaaagaggggagtcatgggaaccccaacttaaagctggtcggtgagaagttccagaggcctggactggccactggtgtctggggaggagggggcagtcttgggtactgagtcctcaacccatgggatctgatgctatctccaggtagatggtatcagagttgaattggtgtcagggagaaacctgcacacattcggtcaccaatgtcttccgtgttgactgttgtagtgtgagggcagaggaaaagcacggttggagagagttttccctacacagttacaatgagagcccagagggactgacaagaagaaaaacggttcaagacatttctctgcagatgaactgggacaggagagtctgcattttagagtcaactaaaaaataaaaggatgaaaaatcaaaaaggcaaccaatgtgcagacacagaagtgcttgtgtgctccaggcagctctctgattggtggccaagaaggaagccaggagtctttgccacaggtgttgccagggccctctggacacaccctttcatttggacctgaaaacaccccacacaaacccaaagttttgctgaccttcctctggtttcgtttctccacctggttagtggccctctgagctgtctcggagagagcccttttcccctgggagatgcatgcagctcgcaaattaattggcaacagccgggtgaatcacccagggacttccttcttgttgccgggcaactgcatgcacttggcagtgggacattaaacacagaggggaatgctgtgaggcatttgcaaaataaaataaaaagcaaaacatacaacaccacagactctcatcccagcagggctggcccagccaagggatgtgtggggggatgagggaatccacacaagggaggaaaatgaggttaggccataagcagatcctaactctccctcctccccacaaatcaaactcttctagatatggcatttgtattccactaaagacacacctctattagcctagagaaagaccataggaggagcaggaattagaaggcatctagagatctgatcccctagaattacagggaagctttgcaaagctcgctacggaactaccatagctactgattatgcttctccatcgtacatcactccacaggttaagtcacctgactgaggtgacacaggcccctctagggcaggatccttccataccctcccctccacccccagtccctttccacttgaatattttcatgtctgttgctatggccactgggagttgattagacaaaccctcccaacacatcgccttgccctgtagaccatgtttctggcctttttaaaaaaaccccagacagaagtgaaatctatgtacattctgtgtttggaaaaaaaagatggggacaagaaatggaagaacagtagcaagagggctcctgttgggggctgaatagtagcccccaaagatatccacaccctgatccctgcaagctgtgaatcctacctcatatggcaaaaaggcctgtgcagatgtgattaaggatcttgagaagttggcctggactatccaggtaggccctaactgtgatcacaagtgtctttataagagagaggcagagggagatctgatcccagagaggtagtaggcagtgtgataatggaagcaagaggttggaaggattcaaggaaggggtcaaagaaaacagattctcccccagaacttccagaaggaagccacgcagatgcctggacttttgctcagtgaagctggtctccagaactgtgaaagaatgaatttgtgttgttttaagccactacccttcccgaaggcaggactaatcttccccacctttctgactataggtcttgagaccctccccagagcaggacccgccctatacccttggggaaggaatgctgatgtcatgaagcttccataaaaccccaagaggacagggttctctggggagcttccagatagctgagcacatggaggttcctagagggtggagcatccaggaagggcatagaagctccacagcccttcccccacacctcaccctatgcatctcttcacctgtagccttcgtaacagcctttagaataaaccactaaacgtgtttctctgagttcttcaagctggagaaccatcttcttccttgtcagtccctctgagccctcatcgtgactgtgcagggaaaactctctccaaccatgctcttcctctgctctcaccccacaacaatcaacacagaagatgttggtgaccaaatctgtggggattatccccccgacacggagctgcggacacctgctgggtgttctccaattcaattctgaccactgagtttgtggtcatttatcacaccagcaataagaaactaatcttgtcaatacagtgtattttccgagagccttttgaagagagtatcataggagagatattggtaacagtgaaggggagctgggcaaaaggggtgggagctggaatttggcttggaaagctcaaaccaacaccctgcagcctcagcaagaaaagagcaggtctgtgagagcatctaaggcaagaagtggccctggcttcgaagtggaatgttaaattaaaccatttgctgactgataacttgggcaggtggcttcatctctgaaagcctcagtttcatcattgcaaaatagagatattattatccaccttgcaaagctcttaggattaaatgagataatacatgaaaagcagctggcacatggtagatgccaaatacaccacaacccttaggaaagagtaggtgtgcacagatgagcataatctgttagttggccactcccgtatctattctaccttttcctcttagtaacagaactctaatttggagttcacacattgcagatcagagtaaaaagactacatttcccagccttcctgtaagtgagatatgaccatgtgaccaagatctggccaaggagattaaagcagaagtgttgcaggacttctggggaggctgcttcaaaaggtgctggaaggagcccagtttttacttgcctgcctttactatcttctgctttcaatgaggacatgatggctggtgctccagcaatcatcttggactcagggacatggaaaatggaaggcatgcagtcagatggtctaacaggaagatgggagcctagatggctgacaactccacagctatcacgttagccttaaatggcctccctctggatttctatgtgagagagaaatgctcttctgtcttagttaagtcattgttgtgttgtcttggatttttttattttttttagacagagcctcacccaggctggagtgcagtggcacaatctcagctcactgcaacctctggcttccaggttcaagtgattctcctgcctcagcctcccgagtatctggaattacaggtgtgtaaaacatgcccagctaatttttgtattcttagtagagatggggtttcaccatattggccaggctggtctcgaactcctggcctcaagtgatccacctgcctcggcctcccaaggtgctgggattacaggcgtgagccaccgtgcccagcccgttgttgtggatttttagtaatcatcatgggtacaatatagcacagatataggcaagtaggattcagagtcactcaaagacaatggttctcaaactgtagccctgatcaacaggcttgacatcacctgggaacttgttaggaatgcaagttcctgagctccactccagatttactgaataaaaaactctgagagtgcagcccagcaatttgctttaataagctctccaggtgattctgatgcaaactcaagtgtgagaactactagtctagagcaagatttctcaaccaggcatgcttggggtgggacaattcttggttgtgggaaactgtcctgtgcattgtgcgacgttcagtgccatccccagcctctactcactagatgccagagccccccgcaacctgatcctaggcgtgatcatcaaaaatgtctcagacatcggggtatgcctgggattgggggagcggacagtaagagtgtccccagtgtagaaacactgtcccaaaggagtaattcttaaccttggctacgctatagaatcacctaggaagcttttcaaaattccactgtctcagcctcatcccaacccagttaaggcagaatctatgagggcaggagggagacagcagtgaaaactccctggctgagtccaatgatgagccaaggttaagaatcgctcattgcagaggggcagccagccagaagaggaactgtgtgctgcgagctggtgaaggtactgaatcctgatcgtgagcaggacataagaggttccaaagcaaaaactgtaataagagtggctggggtagacctgggaaccaacattgtacctgccagatgggtgactagacggggtggaattcctggcagctgtgtcacctcatttcccataagaacagggtggacacctttcagtctctcacataaataaccacacaaagcctcagttttctcccctaataagcagcaaacaataagccagctcccatgaggtgctaagcattagctcatcccacgaaaagaactgtcttaataaaggcagccatgtgaccgtgagcctctttcaagataaactccatgggcacaaggatactctctgagcaagcacagatttcacatatatttaatggagccctgacaataagcttggcaatggggccataaaggaggtggagtggagaaggaagaattaaacgagaaaccagtgaccaagaatgagggagggatgaacaagcagatgccctctccttaaaaagaaagattaagtcccgtataaattctttctcctgccgggaatgacttttttcttcattatttcattcccagcctgctctgctaaaatgctgagccgagcttttccttgtttcccttggcttaaatcattaagtccaggatgtcagtatggggaggcaagggggtgtagagaagaggaggagaaaaggaggaagccaaccggctctcactctctcaggtgtaccaagtcactgcaggaccaggatcaatggcttccctgcactctacgttttcagccccacctggctagcccagatggaaagataaaggaacaggtaccagtctataaagcatgtctcccggaggccttagggccagcatgtccattctttcccaagggatttgccttctattctttcagtccttttactgcagctgattgggacaaggaagaagacgtccaattgctccataccagcaagaccagaaagacaaggaacccaggattctgttccaggttccttttctgtgcctaaggatttccaacaggtcactgcaacaagtgagtctgaagaatatcggaccttgttgcttccagtgttcccaccttcttctttctttttttgagacgtcgttttgctcttgtcacccaggctggagtgtaggagtgcagtggcgccatctcggctcactgcaagctccgcctcccgggttcacgccattctcctgcctcagcctcccgagtagctgggagaacaggcgcccgccaccacgcccggctaatttttttttttttttttttgtatttttaatagagacggggtttcaccatgttggccaggctggtcttgaactcttgacctcaggtgatctgcctgcctcggcctcccaaagtgctgggattacaggcgtaagccactgcacccggcccacattcctttccttaccctcaccaccccctcctcacaaagtcagagatctcccacttgactcaagtccctgggttccctccagccagtaaaccccgtgtgcaaatgtcctgactcttgcaaaagtgttaaaaaacaaaccttaaaaagcttccagatgttctgtttgtattgtggtgcttctctgcgctggtctccagaggccaatacgcagtgcacagcatcctgactgcccagataaaatatgaggcagccaagaggcacagcctgggggtgagtggggatgacccttcccccaggaccacggctcccccagttcacccattaactcttccattgccaaagggcaactttccacgcaaaaaccttcaaaagactgcaaaggaacaagtctgataagcttttaggttttgtctcctctgagtgtccacctcacctcaccattaaacttctcacaccaactgcctttgggatgtcgagtcagggactcaacgacacaagagtgaccctcctacttaagatgctaagttaccattttcaaggacatcttaggagctggaccatccagaatgcgggaacagagttcatgagttgtcgaggcccctctggggctggtggcctctgatctacagaaaggtaattgccaacgggccagcttgtgcacacacagccacacacgcaacccaaggtgcacgcacctgagggcccacgattctttgcacagggtgacgcctgctccctttgatgcttgccggatgtgttcccaatgggcaaaaaccagacctcaataaaacccggcattatcaagaggccggtggtttgtgattgcaccagcctgttatctccgaggccctgggtggggctgctttgcggttctccattgaaaagcattaacttataggtagatcaaagaccctcccgaaccagccgacctggtcccttgtttgtcccggtggactgtgccaaaagatggactttaaagataataggtaccccagtcccagactcccttctgccctccctctccttctcatgcactacgtccctcaggggccatccaacagccaatcataaggcctttccttctctttctgcagatgacccatttagaacaagtcggggacctggccggacagagtcctggccctgctgcaacaatggggatcgagggggagagagaaacagtgactttgagaccaggcaggagctcttctcccctttggcaatcaggccaggagtgaggttccagagagacagtcgctgattccactctctcctcatgagggataaactgctgagtcctcttcccttggtccctaaagttccctgttggcctctactgcccacccagatgtttgagagccagcggtcagtctgcagtgaggacacagtgggacctctgagttgtttggatctgggtcaccgagcaggactgcccattgatatgggagagaaagagcatgtgtccccagactgtgggtgccagcagcctgctcgcctcctgatgttccccaacccagtagtgtaggtcgacccggtcagctgcaggctgcaggctgcagtagcagccatgtttttcttcttgtgttgagggtaccaagctcactgtctggcaaagaagaggcaaacgaatgaatgaatgaacaaatgaataaatgaatggatcactagcagcacaagctagtcatcttaaagcatgggaggcccttagaacatgaacccactcattcctaccaacaggaaaacacttcaggtggcaattctcagagatcccacagcttaatgatacgaagtcagatcagggttccagtcctgggttagttagcctcttaggagtcgtaggctcctgggcaagttacctcaaatctcttgaacccatctgtaaaacagggataatttctaggcttgttgtgaggactgagttaagtactaaagactcagttaatttttttttttttttttttttgagatggaatctctgtctgttgccagggtggagtgcaatgtgcaatggcacaatctcggctcactgcaacctctacctcccgagttcaagcaattctcctgcctcagcctcctgagtagctgggactacaggcgtgcaccaccatgcccagctaatttttgtagttttagtagagacagggtttcaccacattggccaggatagtctcgatctcttgacctcgtgatctgcccgcctcgacctccccaagtgctgggattgcaggcgtgagccaccgtgcccggcctatttgttcttattaatctatttccctatggcattatctccatttcaaaaatacagtcagcacatttctgaagaggaaggacattaagccacttccgtggttattttcctgctataaaccattcctaaaatgtgtacaataaagcccagatccatcttccattactccttttttttcctttttaaatcaataaaattgtttgtaacatttagattaacccttacctcacctccttctatattccctcaaccacccctaaaagttctgagaacttgtgtccacatgcagggaggaggtaatgaaggcaggagtcatgagcagggcacttaagacaccctcaccatgaatgatttagctcagctactgataaaggcgttattccaaaacagctaagactaatccatactctagcttggctattatttcatgctacattacatagaaatccaactcctgtatctttcccttgtatctttcatctttctaatttgtgttctctcttccttgaacccctggtttgtctgtctctgtctcactctcattagagacaccacggccttatgagccaagataggccaactcaactggaaaggatgcttatgggggctctgtctgttctgcctggtcctggccccacatggcctggccagcttgtggcatctgtgccaaggtgagcggggaagctgggcctcggcaccctcccatcacgatggggccaggctgttacccaaggctgcagctggactctcagaggcacagggaggtcaggcagcaagttcacagaacaggccacccacacggcacatcagggctgctggactgtccccagggccagagccgctctggcccttggccctgactcggaagactccaccatatggcctccctctgggagggtgagaggaagaaaagaagtaaaccaggggctaggaagaaccatgctgccctctgaatgccagagacccttcttgggcacggggttggtgggtattagatttgctcccagcaggtctgagacaagaaaggcggtgtccaataaatgaaacgggtaacagctgatagcaatacgatagatgagcagatgagattgggctctccctttctgctcttctcggggtcgttctctctttctctctccagcccctaaatgtgtttccagggtttggtctgaacttcaaaaaccctaaagtttttgggagtcttcacacttttctaattaaagacccaaactggattttcatgtttgcagagaactttgagcaaaagtgtaggcagcacagcaaaacaggaagagaatgatctctctcttgttctcttgtgtgtttttttttttgttctctctccctctctctctctttctcctccccctaaaatgtactggggggtaggggaaggaagcaaacaaaacctctctgcagctttggcccctaagtcccctgagcctgccagtgttctgttgacagcctttctcttttctgcggtcctatagccaccagttccatccctgttggggcaggggtgggggtggggagagctgggcaaggctctgggaaaagagaggaaggaggcaaagagtagattctctggcacagctgccaagaaaagagcccaaatgcctcatctcagcggaaggcaaccctcctgggctcccaggcatgctggggcttgctgaaaaccagagccctggctggcagaggcggtggacagggaaccagaattcaaaggggcggccgaaggaggggggtgcgggggaagagggggaggtttcagtgaatcatataaattagagacagaaaggatgtcaggccaccttcatttccttcctctcctaatgggaattatctcattagccccgagcttcctagaggctaactttaaatgattcctgtaatgggggtttcagtgtacaccccacctccccatccgatctgactcttaggagagctaagaaaggctcttaaaggaacagcaacaaaaagatgccagttctatctactgaccactgaatatttcatgcaacctaaggatggccctttctccttctaggtccacttttaggaatttattgtgagaaaatagtcatgaatatggtgatgagctgtataatggcacaaactcttgctcccctccactccctaacaaaagacagtcatgttctaatccctgctatgtatgaatgttaccttatggtatatggtaaaagggacttggcagatggaattaagttaaaggtcttgagatggggagattatcctggattatccagatggaccctaaatgtagctgtaagtgttcatataagaaggaggcagagggagacttgactacagagaggagaactccacaaaggcagagactggagtgatgtggctccaagccaaggaatgccagcagtcatcagaagcaaaaaacaattctcccctgaagcctccaaaagaaacctgccctgatgacaatgacttggttttagctccagaagtctcagtcagacttctgacctccagagctacaagagaaaaatctgtgttgctttaaaccaccaagtttgtggtaacttactacatcagcttcaggaagctagtacagatataaataaagtttgctgcaaggattgtcatcagagccttatttcacagcaaaagggaaaaaaatgttggaaacataaaaaaactattaaaaaataaccatgtcacatgttcctacaatgaaatactaaacaatcaagaaaatattgaactattacttaatgataaaagattaacatcctataactaaatatggttcctatttcctttgcttttatacatttttctaatagtaagcatcttataattccttctgtcattgtataagttacatgtttatttgcagagtggtatgagtgttaaggatggtttgatccctttctatgaataaagatgcaggaactggtggaaatttagtagaggaagtcaaacggagcaggaggtccagagttggcatccttctgggttctgaaaacctccaaggttcctggcaaaaagactctcctctacacacacctcatcctggcaccatgaggcatctggcctgcagaccctgcctgctaacaaatgaaagagtccagtctccttaccatgcggctcaattccccaaccccccacctcaagtctgggagaaatacagacttgaggtggggggttggggaattgggctgcaaaaataaccctcaaagcatggttatttttgcctccttactcttatctgtctttcaaggttgggtggtgtattagtttactagggctgccatttcaagttagtacaaactgatggcttaaaacaacaggaatttcttctctcacagttccggaggccagaaggccaaaatcaaggtatggagagggttgattccttctggtggttttaggggagaatctgccccctgcctctctcctggtttctgcaggcaatcctcagcattccttggcttgcggatgcaccactccaatctctgctccatcttcatagtgcctttctctctgtcttcttctcttctaaggatgtgtcattggatttaggacctgaatccaggatgatttcatctcaagatcctagctaattacatgtgcaaagaccctatttccaaataaggttagattctgaggttctagatggacatgaattttggaagttcactactcaaactattacagaaagccttcatcttctctttctctttggagacagggtctcactctgtagcctgcctcgagtaaaatggtgccatcttggctaactgcaacctccgcctcctgggctcaagtgatcctcccaccaggatcctctacaaaaaaatacaaaaattagctacctgtgtggctaatttttgtagagacagagtctccctatgttgcccaggctggtcttgaactcctgggctcaagcaacccgcccacctctgcttcccaaagtgctgggattacaggtatgagccaccatagccagcctccctgctctctctctatttcagtccatttttttctctaagtttcagtaactccacgaggtcttctctgattcttccaggtcccatcccttcacagaacttttctgtagtctgcatcccacaattcagccataatgccatactctcatcccctgttcattgcccaggacctacagatggaagtatccaaaggcagatggacactccctaaacggatgaacttcccaacaactgcagttgccaatgttagaatgggtggcctcaggagagataaaattctccatcattaaagtgtccaagcagaaagcacctatctggacaggctgggaggatgttgtgggtctgaatgggagatggaatgaggtggtcaaaaagagtctgattttattaaatatgagaacaaagactgtactcaaataacttagcacagtgctgagcactgaaaaggcactaagcagatgggtattatcccactagggatgttcctttaaatctcaatcttcctcctttcaacaaatgcatggaactatacaaagcaaaataaaccatgagaaagaaaatgctaagtctgagactatttgtatattcaatggccatttgcagaccacctccttggtatactgcactatgggatagaatctgacactcttctgcaagtctctcttctttgatggcaaggtgacaagcagggcatggtcgcatgagcctgtaatcccagctactgaggaggctgaggtgggagaatcacttgagcttgggagttcaagaccagcctgggcaacatggtgagaccccatcttcaatttttttaaaaagcagcagcagaagcagcaggtgataaaccagggcaaatcctatgccaggagacacctaaatcagcacccccaatggttatgtgacctgagaaaggaactccatgccaccagaatgtctagatgagcagttggagggtcccttggcaaaacctaagagatggggttctgggatctatttttgcgcctgcccaacccactaagaaagggagagaaggcagaggagctgctctctgcagctgccaagggcaggctgtctgctcatgctggagcccagacaaagcacacccacccggtggtgatttatcagccgtgggaggcccaagaagctcttaagccgcaggtgggtgcctgtaaagccaccctccctggggagcacagacctcaggccttgctctgctgctaatcaccataagcaccccggtgcctcaaccccgatctgggtggcccttaaccactcccaaagccctgtcacatgctcagtgatctcagccggcctcacataaaccctgtcaagtaagcaggacaggtgttgttattattcccactttacagatggggaaaactctgggggagcagttcgatggcttgctcagggccacccagggagcacatgtcccaattcctcccatagactaggcaggcaagtggcatcgccactccctctgtgctgcctgccagcacttgagggttttacaaaggtggcaacaaataccagggatgtctcttccccctgggccctgggtccctttttggacactggggagcctgactcactaaaactcctgtgtctttctgttcaatcatcctccctcctcctgcttgacagtttggaagtggaggggcagggccctggcaggagtagacatagcttgtgcccaggctgagcctcccccaggagcagtaaaacatgccttttgggatctgagaggagaagctgcccattctgtacttttccagacgtggagaaagaaaggagaaggcagagcagatttgaactcctggctcaactcaccagccctgtagaggtcctcagagatgagccttgtatttcactaagcagccccaggaagcggtttgggggacttcagagcagaatggagcaagaggaacactgcccttgttgggggccggaagtcggtggggtgtgagttagtgatcctcaggtcaagggcctccacgggaggatgggacccctggacccacataacccacgcttcccaaaggccttcactgcagattcgacggagccgcaggaaccaggactcaggaggtggcacctgcagggccgggaggagagggacatgcaaatgaggccaggccatccacagcccactcctcctggaagcccagagtctggctggcaacttgaacctgatcttctaaacaggacaaaaaaagaaaaaaaagttgtgatttcccctgaccaacccatttctttttcccccttccccaacccctgtggaatttgcaccctcaagaggcacctggggagccaccagcaactaagagttcaaggggctcctctgcatttggggtcaggcagagaggagccacagcaagggaaggtgagtggacagttgcaagctgtgaaaagccaagttgcctccaggcatctaggcctgcgtttggttcccatgacactcttactggcagcgttaataactaaccacgtcccagacaggtgctggcggcctagccttaggagttcttgttcagggctggaaatgagtcacttcccttttatagtttgctaggagactgagtcacccaggggccgaccctttcacacaagttctcacaccctggccaactaatatccatgttcataccctagacctacccatctaccaggtcagccaggcccagtggggctgaccctcatggtctatgtcaaacagcatccccaggagtgacccagtccctgccttttccctttgtccccctactctctcaatggagatggcccactcactgtcccaagaggcagctcctgcctgggcagctgtctgagaaggacagagtctgacaggtaggcgcccatgcccaaggcccagttagatccacctcatctttgaccttactctaaacattgctctcatacgtcctcaatcctctgtttggaaaccaaaaacaccagaagtggaaagttccagagctgatgaactaaaggacaaaactgcgatgcagcaagtcagcttcaaccctctcgggaagggcagaggctgaaagcaggtaaactgaggcctgtgactgttaatacactcccctacttcaggagtcaggtgggaggcaggagaggtaggtcatcgagtccaaggctctgagcacccacattcgtcaggtggctctggtgtcagtctctcaggactaatctcctgatagacaacaaataaacatcattagagaaaacaagctcatatgcatttttcagtaacccttctttccccactctcgtatggcctctcttatgtttgccagcaggtgggtacccatgcccaagacccagtgacatccatctcacctttgacctttaccctaaacattgctctcataactcctcaacccaaggggtgcatttggtcttttttaatttaaaaaattaatttttcttaattaaaaaagagtgtatgtaagagaaaaagaaataatgaaactaaaaaacaggaggttaaaaaaaaaaaaacctccccgaaatagtttggggatttacttttttttttttaatcctcagaaagtccctcttgctacctggtttctaaaacagacaatcaacagagatgacatcagattaaacagcactgggtgtctcactgccaggggctccaggcaggtgtgagactgacaggttgagaaaagatgacactatttcttcccttagaagatgaaaaccaaggaggagaaatgacagcagaggctgagccccgggtgtggtgggaaacgtgacaccctgccagccgttggccttttgggtgaactctgctcgctcctctgcatgggacgacactgcaacccggcgcttgttagttcccccatctctcaggtatcacagccaaactcaccccaagggctcagaaagctcagcctgtggctgtctcacctccacagagccccctggactttccaagcctgcattttgaactctgttggctgcggccgtggctttcacttgacctctgcagagagagaggggctttccctgggacacacgtcttgcacatagcagctaagagcgccagccaagcttcgtcgatagcaccaagggtccagatgccaggagagagactccacccccagaggtggctcaagagtccaagtgagtcatgaggtctgaccagcgaccataatgtcccagggtgaagtgggaggcctggagatggagcccgctgcagggacaggaaccacagtgactcacagttggaccccgaggggaagttccatctgcaaatcctctaaatggctctggtccccgggtgagctcatctgcactgccgctgacactcagaaccaggactggcttctttctcccagggcccgggtttttcactctcaattatggttatggcagaaaccaacattcgagccgcagcacctctcccctacccgccacacacacacacacacacacgatggatggacctggggagacagcgtgtcctcctggagcgtcagagttttcacctttaaaaacagtccttcctcctaatgatctcaccacagaagctcttggagctatatggtagggaatgtgacagttctttaaaaggaagtatgtgaaatccacacaaggcagtaacattgtaatatcactgtttaaaactttggctccagggacctggccatgaggctaccatcttgctccatctccctgggccattggtctgggagcggaagaatgcaaggcattggggaggaaagtgtccatgttgcccaggagcctggcgggatcactcagaaacacactcaaccttgggagaaacacacaggtaaagaccccaccactcccattgccctttcctgctctaagcgcttccagcagactgcaatatgtccacaattctaaggctttatcaggtagaagggggttctggcgtggcccccagctagctctccaccgtgtgcatgaacagcaaggtcccccaaccaagggcaccaggcattcatttcccttataggttctgttttcaggttacgtgcaatcacgggacagctgctaatcaccaccaagacggggccgtcccagaagcattcttagaaagacacgctggttctgcgagctctgaagcacccttagcctgtcctgcctggaggatcattgtggctgcaggacgagaaagacaagaggaaagacggccgacccattcattcctgccgttgtcaagttgtcctttcttggagggaggaggaagacgggagggtgctaagaggctgcgagacaacaaggggacccctcaaagagcatcagggagaccacgaagaatgatctcaagcagtattagctgctccatggcatgataatgtccctgttgggtgttccctgcactctgtacccctcataccctaacttcatcagaacaggaggaagggggcatttgctgtctctctcttcctacccatcttccccactccctttcatttcttttttttttttttttttttttttttttttactgctggggctgcaatctgccagtgtgaaccctggtggctctgcaggcagcagggtgaggagagtgaccctcatatgaagccacgaccccaatgcaagaggctatcctgaatctgggagtcacggttgttcagaatcagtccctgagatgtggcaccgtggcgtttgacattatcaccaccatcgatgtcattctatggtaacgtatgtgtgccattgtgtgcctgggacacaaacaggcactttcgatacccctcctgcttggacccttcccctgccatcccctcctcccactggccgccctgttgctctcagcttccctgtaaagaggcctttttcacaatgagtcggatcacagcatgctttgctcaaaaccctgcctggctcccaggtccctcagagggaaggcccaaggcctctgggcctgacctggtctgacggtcaccgcccctctcggcgctcagcacttactgagcttgattctcaagcacaccatatactcctgcctgctttgggccccaatgtacctgctccctctgtcccaaaggctcttccccaaaacatcctcctacaagtctgtgctcaaatgtcaccttctccattcagccctacaacctgccctccacctctctccctgcactgcacactggagctgcctttcctgcctctgtgttttttttttcgataacactatcacctccttacatactagataatttacatactaactattttttactgtttagcctgccccaccttgacagccagtgtggatgcaggacaggaaagacaaaagaggaatgatggctgacccaatgcttctcatctttcctggccccatgatgtggtttggctctgtccctacccaaatctcatcttgaattgtagctcctataattcccagtgttgtgggagagacctggtgggagttaattgaatcatggggacagtttcccccatcctgttctcatggtagtgaataagcctcacgagatctgaaggttttataaggggaaatcccttttgcttggttctcattctctattgcctgcccccacataagacatgcctttcaccttccgccatgattgtgaggcctccccagccacgcggaggaggtatgtctgtatcagcagacatatgtctcaggtatgtctgtatcagcagcatgaaaatggactaatataccccattagaagccaagctccatgccagcaggacagagcctgttttgttcagtgtctgttctctgcctagagcagtgccagcagtcccgtaaatatctattagatgagtgaatgaatgaatgaaccgatcgatgaacaagtgaagggtggaattactgccactcatggggagggggctatgcatctcatggaatgagctggtcttcagggtggggttccctggggagtgggggagagggctggcaaaggcagaaggtgctgcttccagaaaggcagtgcccgaagtttgcctggaaatccccttggcatcactcattaactaacccccaccccaatacacatccaaacccaaacagtagctgaagagtaacttcaaccatagactctctttccaggcccacgctcccaccggtgagtgcatgtagtcatctgggcacctaccgtgtgctccttggatcccaggatgagcagtgaagaaaggatggcgggggatgaaagagatcccctcccaccctcatcccactctcaaggctctagctggaaggcagaggcaacactgcagatgaagttctgaaagtgagatggtgggcaggtaaaggagctgccagccccatggtgccatggctgtggggttttaagcaggtgaggtacacagatggtgacacagggagggggtgtgctgagcacagtggcagggtacagtcaagtccagtcttggggtgggatacagaccaggtgagctgggctgaaaggatccaaatgtgagtgggaagtgatgggaagtgaggtggagcgtccagtgagatttggttgctgggacaataaacagagagccatgatgggttttttcaaataagaaaatgccatgtccaatgctggatttcagaaagaggcttagggaagataccaataggattactttggggaggaaagacttggaatccaaaggctggggccccttgtggttatcccagcttgttctacaaaagccgacacgagaggggtgactcggagaagggagggaaaggatcaaatggaaaattgctgtggagtcattgtcaggacttagtattctagtgaatgggggagttaaaaccaatgtccaccttccttctacttgagccatgtggaatatgataaagataaataaggaagggaactaataggcatctgctgtgacctagactttggatttggttatttcattcaattctcagtctcccctgaggacagggtattagcatcagcatcttatagatgaggaaattgaggctttgtaatttacccaagatcatatccagagctagggagattgtaaaacacagaagaaaaccactgacattcattgtaaatgcataatacatcccaggcacttaactgtatattctttcatttcacttcaaaacatagaagagattatttttatgatctccattttataaatgtggaaagcatagtccagaaaagtgaaggtcaccagccccaggtcacaaagcaaagacacagtggaaatggaatttgaacccagggcatctgggtccacactctaccactacactagcctgatagtgacaaatttgcaacataatctgtctagttccaaaaatgtgtttgcattgtacagcaactcaagcagtattagctgctccatggcatgataatgtccccactgggtgttccctgcactctgtacccctcatgccctaacagcatcagaacaggaggaagggggcatttgctctctctccctctctcctcctacccattttccccactccctttcttttcttttcttttttttttttttttgctgctgggcctgctatctgccattatgacccctggtggctctgcaggcagcggggacaaccctctcccaggcttcatactagtagagatgatctgttgcttagtacttacgactgagacttacacccagtgctgtaactgctgtggatggtggaatctagacagccctgggcaaacccagcccttgcagtaggagagcggccccttgttccacatcctgttttattgggagcagacttcagtcggcagcatgccagaaagccctgatatcccatttaaccccatggacagtctctgcgctcctgaaggccagcaggtgcaatccacctgtttatctcctggacccgcaggctttgagtcacctgcttcatgttctccctgcaaactgcgagacctctgtgccctgcagtagactcggcgtgttcagggcaggtagcaggagctgttgcatggtgccccggggagctgggaaaattcatggtcactcaaaacagcaatagatcccagcaacagtctaggcctggctccctcactagttaactgtgtgaccttgggcgagtgaccaaacttcagtctccccatctgtaggttgggcataacaggacctgactgctagagttgtgagaggtgaaaatgagttgattcaactaaaagccaggagcacacagcctggcctgaattaattgtgatgactgtttgtacttattaacccctgtctgtggggctctccgatggctaactgcaaagctcctgcctgccaactgctgctctgagctgggggcattagggatgtctgggcaaagggttgcactgaagaaggagcaaacctcaaagcaagaagagccacaggcaggcagctgtactataactgccaagtgcaactcacctctttcttgtcctttcctggttcaaagcacccaccgagtcagccagaaacctctgattccacctagaaaaataagggaagagttacaccaggaagcaagataatgaaactcatcttgaagcttaaacgtggacggagtggttcctcagtgccagacagctccccgcaagcacataggagtttaatagctgtttattcttccatatagactaaaactacattcatcagaaaaaggggagtaattcatttcctatcccaattatggatatagcagactgaagaatattttcaaagaaatacagtttattatgatcacaaacttgacctagagtaaactaagatgtaaatggatatttacactggatagtaattgttttcaagttataaaaatacttaagtttacaatggacatttactacaaaacaacctaatgccacagtgccaagttgttctgtttttattgggtcttttactcctatgatcctatttctaaatgtttatatgttctaatttgtgatatgtctgaattcactgaatgggatgacatatgaggaacatctagtgccatgtctggtccctattaagcgctcaataaacatcagctatactattattaattacacattcctgttgtgggtttctctttcattccacccatatagttcctgaacaaacgtacacagatatcagcatacttgctgctgctaaaatagatatttaatctttaaacccaacctctgttcaatctaattcagacaccaggaagagtagtatttcaaaaggtgtttaaagataatagccccgttctacctttccccatcattaggctcaaagaaatcactctagacccttaggttggcaaatgaaaacagagagaagaaagaaaaaagggaaaaagaataccatcagatttgaaacagaaaacttgtaaccttcacacacaagagaaaggattgtctctggctggtgtttgttcttttgctgggtgtacattatacatgatcactccggtggtttctgagttactgaggacaggattgggctggcaccctgtggccaactccatcaaccagcacctaccaccagatcagatgggaggtccccttgggctccagcacccccacagcccacagcagcaatacatgtttgctgggcctgcctcccactaccacacccatgaacttaacccaggaccaacctccaatgcacaggctcttgactgcagggcaaaggaggttgacagttttagtcccaatgaatcatgcaacacttgggacctaactggccgatgctggacctaacctgcaaatgctagaaaactcaccacaacagagcaagcaaaactccacaagacccaccaactccaacccccgcatctggaacgggttcctgtttctactttatacagagccacccccatgcgcaacccattttcagtttgttactaggtaggaagcatccaataaactcattcaagctaaagcccagctgaatggacatagcttcagtgttacccctccatgggggatgtgcattttatcctgactcagtcttaactcttcaccctgtccccgtgaagcctcaattctgccaatttaataatggcagagattggggagagagagcagtgggacactggagagggatctttttgaaatcctacagtggggagtaggtgaaagaggggaggcagaggcttacagtggaggctctcagacctggctactcatggaaatccctgccccctcccctgggcagctggaaaatcattctgaagcctgagccccacccccagaggttctgattgctacaggtgaggcctgggcactaggatttttttttttttttttacgttccccaggtaagtttaataagtagcagactctgaggatcatctggccgtcttgctgaaatttgcattcggggggtctggggtggcagcctgagattctgcctttctaaaatgctcttggatgaacccagcactgggggtcctcagaacactctgagttgcagggacttagaggtatcccctcttgccctcctatgcccccaaggaacctcaggcaagctgaccacatccctacctccagccacagctttctcctctggggtggaaaactcttttccaggaggccccagagacatgcccagttgacttctcgagtgccaactgggtaagagacattactcatgtcccaagagacagctgccccctttcccctttcctgtaatcctgttccaagcagtccaccttgtaccctgaagtgcacctggatcactgcattcagcacaatggtttgtttctgctctggtccttaaagggagtaggggtctcttgcctgctggctttttgcattggcaggatgatcagggccaccaagacacaaggccgcccagggagcctgactctgtccggggcccactggccttggcatctgccctgtgaagcccttccgtggcttcacacacacctccccaccacgtagcactgccctcactgtcctcaccgcggacagcggtgggacagggagtggatggcactccctcggaaagaggccaacagcagcatgccacgcccgactccaaacctctgagggaggccacagactgcaactggctacccacaacctgcccccaagggtccctccctgccttctgcacccccggccccacccctcccggttccttccagacattcccggggatgcctggagccatacaccacctagtggttcccagctcaacaccagcaataaggcacctccaaccaagatagaagagccctctcctccaggacaccttagactgaggaaacaagaaataaaaggcccagcaggtgaggccacaaggagacattaggctggaatacgtccagtcccacaaactcaccacgttctccaaaaagtgcaccaggaaggcaggaggccgtgctggaaaaggcggccacacgttacaggagaagaccagggtggagagggaaaaatacctggaacgggaaatgggatgtcaacactttatgagctagagccccctctttggccagaataagagttgcaggttgggggaattttggacattcttgatgggtccaaaatcaaagcggagtgatttcaacaaaacatgccaagtagtcaagaagccaaaccactgggtccaacttctagaaacctacccaaggccaacacatccactgggcccccaatacttttagggggcccaagaaaatgttctaattcctttgaaaacaagaatgaatacaatgacggtaatatgaatgcctagataacaatgaatccagcctggattctattcatccttgtatcactgtaattgtaaaatacaattttttttttttttttttttttgagatggagtctcactctgtcccccaggctggagtgcaatggcgcgatctcagctcactgcaacctccaccttccaggttcaagcgattctcctgcctcagccacccaagcagctggcacaagccaccacacctggttaagttttgtacttttagtaaagatggggtttcaccatgttgaccaggctggtctcaaactcctgatctcatgtgatccacctgacttggcctctcaaagtgctgggattacaggcatgagccactgcgcccggccgtaaaatacaatttttaatgttttatttttatggaggaaggggcctaggaagacaaaagtgccaaagatcatgaacatcaccatttggttcggagtttacctactttttttccagtctccaaatttgtcagcctttactgaaaccccttgttgaaagctctttctgggagacccccacttgagccaggggacccatccccacctgcctcccataggtacatcctttttactctgggctctactgaaagttttctgacccactccaggcaagttcatccgaggccccggcaccctgggcctgtttctggccaggcagaagctccaacagctgccacccccgcctgtgtgtgagaagtgcagtctggcaggacggagcagcaactctgaagtccaaacacacacactcagccccctgcagcataaacacggaggatacatcacacccaggcctataaaagataattacacaatctgatctggcaaattagtgccgcagaatgtctaattctcacaatgaattccagggttggatcggcaggaaaaattaacctggatctttattgggatttgcccccaggtcaggattagggtttatttatctcctttattttcctgctgcaggagggtggaaggccttctctcctgcccgcccctccccactgtatccaggcttggcttttcgataagcaagctgcccggtgatctttcccacgcactacctaacccagctcagctaaaatcaaagaaagcaccaactaggagatacgtgtgatttttttttcataaggaagagaaggtcaggcatcccatatcaagggattcactagttggaacaaactcaatacaaggtaaacaaaagaatgaacatttccagatggcaatgtacctcctaattattctggcccggctctgaaatgtttacttggagaacactcacatatacacatttctccaaacacctttttctttctttctctctttcatttgctctccctttccaaggagtctttccagaggagatagtgattaacaggagtcggtactcatctcctatgctcattaaagagctagatcaccaaagtattgttaccgcaacaccaagacaagttgacaccaagcaaggattatctttcatctaacaaaaacaaacctgatggcaggccggcaagttttctcctctctttttctatcttcctgggggtttcccctgcggaagatcattccctacccaaactcccaagtcagccctgcaatgaccacacacccagagcttgaaagacaagactccagtcaatatagagggttagcattcacacttttagcctacagaaaatgtgagtctgtcagataaatgaggcaagcttccctgcatctaatacccatgtgatctgctcacaaaattcttaaaaagtgcctctctctgagactgacctgggtgaaagagaaactgtgcttttctaggcttaacggtggagggttacagtattttgctctggcgtgggcaccaaactcctccactttgggttaaggtttatcatatgtgggaacctcacctaaaaaaacatatatacacgggcagaggtgtgtatgtgtgtgtgctcacgtgtgtgcatatatatatatatattatatttatatttatatttatataattttatatatatatttttttttcaaggacaatgactttatggaaaaacaaaccagttctaaacaactgcctctgacttaaagcaatgaaaatgttgttttcttgtgcctcacccagagggattctaggtgacccagtgagaggtggtggagagagagactagaacgtgcaaacttatcatcagctggagtgcaatctttgtagagttctagccaaatcgcaaactccagttccaaattgggtgagacaagtgtgcactttttggaaggagataaacacccactccgtgcaggctacattgaggagtctcataaggagctgagagatagcaaagaaaaatatccctcttcctgaatggtgaacacagtgatgccagcttcattctgaacagccatccattctaggtatgaatagaggccatggatgaggagcaaaagaatgccaagcagtcagtaaaaatgctgtagacacaaggaaaacacaatctcagcatattattaaatgatcaaaatcatgtcatacatgcatgggttctagaggcagagagttgcaaactaaaatcttagtctagacatttttttttttttttttgagacagagttttgttcttgttgcccacactggagttcaatggcgcaacctcagctcactgcaacctccgcctcccaggttcaagtgattctcctgcctcagccttcggagtagctgggattacgggtgtccaccaccacgcccagctaattttttgtatttttagtagagacggggtttcgccatgttggccaagctggtctcgaactcctgacctcaggtgatccacccgccttggcctcccaaagtgctgggattacaggtgtgagccaccgcgcccagcttagtctagacaccttctgggtgtccattttctcaaccgaaaactggggatagctgtagtgactacttcttgccccttataaaccctctacaaccataattgttattttaatttgaggatgtaaaacaggactatgcttttttctatattgcttatttctatatatataattaattctaaattaaactgtgtattcacctgctttgcatatttcctgcaccatagcaagtaatccataaatgttagctattgctaatactgtaaaaaaaaaaaattatagaattgcatgggttataaaaacaaacttggaagaaggaagcaaaaggttaacattagttatctctgggtagtcagtttaagacttatttgttttcctatttttacatgtctaaaataaacaggcattgtttggtgaagacaaaagtgtcatggtatttaaaagataataaaaataagatggacattcattgttttgaactagaaataaaactattaagtgtacttaaaaaaaaaacagtaaaaatagaagctacagacttgtttgctaaatcagaaatggcttagaaatcaaggataaaaagtacccccaatagggtactcttgggaccactgacatgacccaaagtgagacaagagccagacacacccagatggcaagttctgctgtcagttacagggatgggaggacagctctttccactgaatgatacagtcaatactggcttgaatgtgaacctgactgagaatcctaacccagctgacaggctgcaggccacagggttgaacagacctgctctgtggcatttcccaaatacctgtgccattatagacagacggttctcacaacacccgcctttcggttcaggacctacagccccttgcacttccccacgcctgttacacaagcccaggctgggagcagagggcgagctccacgacagcctgcagaggccatgccagaaatatggggtctgcagccccacatgagcccaggaaagcaagagtagacttgatcctcagagtccatcttccaactctccaggcctcccaagaaggtgggaatgcaggtgacaagggggcctcgctcaagtgcccagagctcagacgctcccccctactttcttggctccccttcttcctcccaggtccagcacaaaggggaacccgaggcacagtcctcagcccatcctaattcctgttgcttgccctcttccttgaagacgtcccaaacccctgtttcggacctttttcctaaagccccattttgccaaatgcctacagggcaggctgatgactgattccagccaggatctcaaattcactacatccaaacaaatctccatatatcctgaaccaggctcctctcaatacctccccatttcagggaactgaaccttactctcttggtcacccagatgggatgccctcccctcccataaagctcatcactggatccaagcacctctgttaatgctgttcatgatccaacttctcttatattcctatgaccatgagaatggctaatctcaggtctaggatattcccataataataatgtcatgtatttgtctattatgtctcttctttcattccttccttccttcctttcttgcttgcttccttctccgccgcccccaccccccaactccttctgtcgctttctttcatttttatttttgagacagagtcttgctctgccacccaggctggagtacagtggcctgacatggctcactgcagcctcaaccttgtaggctcaagcaacccttatgcctcagcctcccaagtagctgggactgcagacctgcaccatcaggctcagctaatttttaaatattttgtggagatggcgtctccctatttttcccaggctggtcttaaactcttggcttgagccatcctcccacctaagcctcccacagggctaggaatacaggtgtgagccaccgcacctggactcatctctttacatatgttcctttacttaatttccttgacaatcctccctcatcttgcatcatttcttgccctgtacactgctcttccattcactatctctatttccatgctggaaatctccaagatctttgatacctcagggtctttgcacttgctgtttccttaacctgaaacattttgcttaactttcaaagtctccactcaggccgcacttcagagcctaatctgaaatcatatttgtttatttcattttggtttgtgtctctgcccacaagattgttaagatccttgagtgcagatagcttgtctgttttattctccattttataatcagcacctgaaacgggcccttttagggttgaacgaatgaatgaacacgagcatccctagatgcaagatacggcaaggaggtacaggaagatttaaaactggctcaaggtcctatggctggtaagtggctgtgtcaacctttgcaccaaggttctctttgcacaggggtaaagctgtgagtgaccttctactgttaaagcaactccccatgtggctccttgatttcagacttgcctcttctggtcccttctacggagttttcccagctgctcattctaaaacaccaattagttctgccaatctctgctcagtagttgtcaagggctccctactgccttccatgtacagacccaacctctctgcctgaaatgagaggccatctgtactctgaccccttctctttcctctccagccttgtttgtaagatgtccctatagtcatcttatctcatatctacccccccccacacactaaagctcactgctccccaccacctgtaacaccttccccgctttgcctctctgcaatacgttcccttgaagcccacccccaagtcccaccacccacagaaagcctcctgattttctggcccttggtgaaggctcatacttgagccttagggttcactgcctatgtcccacgcttagcagtaagcataagataatgggggaccaggcgtggtggctcatgcctgtaatcccagcactttgggaggacgaggtgggtagaatgcctgagctcaggagttcgagaccagcctgggcaacatggtgaaaccccgtctctactaaactactaaaaaattagccaggtgtggtggcgtgtgtgcctgtagtcccagctactcccgaggctgaagcacaagaatcacttgaaccctgggggcggaggttgcagtgagttgagatcgcaccactgcactccagcctggacgacagagcaagactctgcctccaaaataataataataataagataatgggaaaaaggctatccatcctcttgctccaaaaagaccttaaattcctttagggtgggtaatagacctcatgtgtttgaattcctagagcctagcacagtgcacaactcattcgtacgagtagccctggttaactgagagcaagctatgcccctcgctctgtggtctgtggtcctccaccaacctgtacagacaacctccgcaacggcagagctctctggagactgctaaactagaagggctggactttctgctcttggtggcttgtccatccctccagtctttcccaatccacctccatctggagctgctaatgactgtccaagtttcagctctctcctgggtcttcctagagcagagtagtcactaacttgaacttaaagatggagcccaacccactgtgcttaaaaaaaaagaaaatcaaaagtttatgagcccatcgggggtttcctcctttaaaatcacttctttgcccctagggatacccattgaatacggtgtccgtacccattagcaaagcagaggccacagaggccgagcatcccctggcagggatcatgatgtcactgtggttgaacgctgctcccagcctgtgaaggcggaaccacagaaggtgtcctaggcccaggtccaccaacctcacgccaagccttagcccctatgtctcggtttcaccatgtttaaatggaaaataaaatgctccactcaaaaacacttttccaatgatattttaaggaaaaatgagatcacagaaaattagggaggtaagtttaaatggtgtgaccccaagcaacttttttttttttttttttcaaagaatcccaagaggcttgttcaccagaatggtgggaggggtggggaagaacattggggaagattgtaagccccagagaccacctgcacagcagcaacacttacgctaacgtgaaatgctcacaatgctataaaagcccacacctattgcaaacagctctgtcctccccggtcctcatgcgcaaccggaccctgaagtccttaggtttgtaaaagctgccgaccggccaggtcaacatctgtccctgccagagataccaaatgtttcctaaacccacctcaagcccagctcactaagctatgaatagttattaatgttaactcacggcattaattaaaaaacgttcagccaggcaaattctcatacttttaaaaagtcatttgggtaattgcctttccatgccgcaaactttccaaacgactgacaggttgacatttcacaatgttgtttgttttaatcaagaagggggggaaagtcagtgtggttccccagttcatttttcaggtgccttgatttattgattggcaaatccccacttaatagctgtacagcgaggctggggatgaatgtggctcccgccaccctgggttggtgtctgggctggtgaggagggaaatggcttcagggcagtgccccagcccttcctcccccttctcttgagttttaacaccccccccagggaccaaggccacactgcatgactcccaacccttatttcagaggctcaccctccctaccagacaagggcaacttcctgaaccaacaccgaaggcggtggtgctggttcagcagactcaggatttgggggcagagtggactaaacccttggtggttttccaacctagttcttcaaagcagcagagctcagagtcaagccagttctgtgagtatgaatcccgcctccactgtttatcatccttggacaaatgccttaattcctctgtgcctcagtttcctcatctgtcaaaatggatataataatagtatctacctataagtccgttctgagggtgaaatcaattaatatttgtaatgcacttgatatggtttggctgtgtccccacgcaaatctcaatttgaattgtatctcccagaattcccaagtgttgtgggagggacccagggggaggtaattgaatcatggggccagtctttcccgtgcaatctcatgatagtgaataagtctcacgtgatctaatgggtttatcaggggtttccacttttgtctcttcctcattttctctagccaccaccatgtaagaagtgccttttgcctcccgccatgattctgaggcctccccggccgtgtggaactgtaagtccaattgaacctctttttcttcccaggctctggtatgtctttatcagcaacgtgaaaacgaactaatacagcacttcaaacagtatctgcagtaaaataaatgctgtgtttgtgtgggtttaaaaacctccctcgtccctcacaaactctaatccaggaacccaacagtcaactgacaacagacttggatgtgccctggctgacgtgagcaggacaggctggacctcacccattgctctggtgccctgtttccccagggcgccactgacgcctctccaaggcccagccagtcctagagcacacggtttgaaagccactgcttattctaaggactgaccatcttcagctttctactggacacacacacgcctgcccatggcaagaagtcttttatggaaagccaaacgcattctcctggaaaggccacatggagcactccaggctccctctccaggtgtccccccaccccctgtgtctggcggcaaatggctaatgacagatgggcagccggaggaggcctgaggttttcatggaggctcacactcacccccccagcgcatcaccaccgggagaacactgcagccaagcagcctaatggaaacagacagcagcaaccacacagcccttagggaagaaggagttttcttaaggaaaaaaaaatcactaagccctcaggcaaccgtataacaacaaaagacaagaaactagtgagcaaagacctctctctacaatcaccagcacaccataaggtatttcagtattgatggaacgcctactatgtgccagggattagaccaggcaccggaaatgcaaagaagagacgggagcttccaggctttccagagtggaaatctactaagaaagatgataccaactaacacttatattttgtgatatggattatctatgtttgtgtatattatatataatgtatacattaatatacagaatacgctccatgtgcacactgaggctgggggagaaggtggctcccacctccctgggttatcggggcaggggcgtctgagctggtgaggaaggaaatggccacagggtcatttgccaaagggttaacttggaaagaaagctgttgggtatgtctgagtatgaatggcaactctggtattctctagctgtgccatcttggacaccgaggtttttatagctttttaaggcatgcacaccaccaggcaggcagataataagtgatcagttaatcaccaaggacagaaaatgaggaagcctggcagaggtggtatgtgaatgaggccacagggaggtagttggctgtgctcaaagtcagacgagtaagtgagaggagctcccaggagtgcaggggtcgcgtggcctcgggcctgcatttacactgctttatcatctccattggcaagatctgaaccatccttcctcctccttcctgtctctctggggtgtctggaggtacagaagaaccaagttggggggcggtggtcaagggatggggagaggttgaagatcttcgattgcagaaggaaagccagctaggaggtaaaaggatgattcttttccttgtggaagccatgtatgggcaatggttgaaggcgtctttgggtttatcagaaaatcctaacagaaaagaaatgatttaccaggtaagaatatgcagatattctgaaatactaaacggaaatcctaaagccccataatatgacactttctttgccaggctcggctgacgttaaagcctcgtgctgtgaccaggagcctgatgggaaggttgtttagctgggctctcctaatcccaaggccaccccagagcacaggacgacgggcccctcttggaaccaggcaaccgggggaacccaggcctgctcctcgtgtcaccccactggcttctgtgctgtggtgggactgtggttttcagaaagttacttaaacccaaggtctgagataaagacagcgatgggagcctcagtcatcccattccaggcttccgacatgggacctgtcagtacccctgcacacctgctagcccaacagacatgattaaccagggaggaaggcagggaggaagaaggtggggagcaaagcaaaagaggtctgaccctcctcccgaaagtctcagaaactccaaacatgtggttaaacagcctcttgaggaggagtatcactttgcacactatggcatgtgtataaaggagcaaagaataaacacatgccttgcctccaagggcttacagtcaaatgcagaaactcagcatagcccaactccacagtgcacatatacaggctgtagaatcatgcatgaaaccaagacacgtgcaagcaaagttttacgaatgtacacaagtcaaggttcaagtttataactgaggaggcggagattgggtatgctaactgccttaaatgtttcagaaaaaaaaaataggtagaatttcaaattaatgtaggcatcagttcaagcttaggactattggtttccagtatcatttagtatacattcaactctttctaccgggctgttcagagatccacatcgtctgcctccaactctcatggcttgtaagtttctagctgggtttgtattacaagaacttgtaggcctatgtttctgtttctgttaagatgggtgcctcttgaaggcatggtccagaactaagtatctttttctgttgtgagatgaatgtaaaacatttcagagtttcaccttaagaaatcccattccagccgggctccgtggttcacacctgtaatcccagcactttgggaggccgaggtgggtggatcacctgaggtcaggagttcaagaccagcctggccaacatggtgaaaccccgtctctatgaaaaatacaaaaaattagctgggcgtggtggtgggtgcctataatcccagctactcaggaggctgaggcaggagaatcgcttgaacctgggaggcagaagttgcagtgaactgatatcgcgccattgcactccagcttgggcaaaaagagcgaaactccatctcaaaaaaaataaaaaaaaaagaaaagaaacctcacttcccaaaatatcctccatttagtatagggatggagattattccagcatcttgtatgtagaaagatgtagaagagtccaattctgccaggccgtttccaataaataacgggcaaaacttcacatcatgtggtcaagagattgttgagagaactgaaggctgtaactttgaccactaaatggcttaggagcctcagatagacacttgccttatttacatctttacaaattgtatacgttggatatttgtaccttgggttttgtgtgtgtgtgtgtgtgtgtgtgtgtgtgtgtgtctatggttacgtaggatcagtgaaatatgggtgcccaactttggggtaaaggaaagccttggggtggaagcaaagccaagcctaaaactcccagcccagccattattctctagacctcagggcctgcaagattcatactgtcctcccaaaaaatgtcctgggcctcttgtgtagacattcataccaactaggcccttcaaccagaagatacttagagaagactccaaagttcccaacctctaggcatttgagaattcataaccaaaaccaggctctcagtttaaagcgatactgtgatgagtgacaaaacacgtgagccttttgagcccatctgcagaaagtgtccacttgacacggtcacacaatgagtagcctctgaggtgcccggggccacctctcacccaggcaacagcagaaggaactggggacttatactaacaccaaatcagaacctactactttcagacactgccaagaagcagaagaccgcaatttattggttaagaaaaatactgccataattaattattcatctctgccaataacaataacaaccaatagtgagaacacatgatcctatttgcatttcttttctccatctaaaataaatttaccaataaaaatttaaaaataaataaggccaggcacgcttgctcacacctgtaatctcagcaatttgggaggcagaggtgggaggactgcttgaggccaggagttcaataccagcctggtcaacataggaagaccctgtctctaccttatttcttttttattttttgagacagagtctcgctctgttgtccaggctggagtgcagtggtgtgatcttggctcactgcaaactctgcctcctgggttcaagctattctcctgcctcagcctcccgagtagctgggattagaggtgcgtaccacctacacccggctaatttttgtatttttagtagagatggggtttcaccatattggccaggctgatctcaaactggctggtctcgaactcctgacctcgtgatttgcccgcctcagcctctcaaagtgctgggattacaggcgtgagccaccacgcccagcctctaccttttttacaaatgaaaaataaaaataaataaatactccataatcccacagctctgagcatgctgtaagtctgagaggtaaataatcaggtttcaatgttaaatgtcaatcccctttcatcctcctttccctagaagcagccaagtataaatcagagtcgcagggatgtaggaatccaaaatgcagaacttcccaacagcagttggggtttaatttgccacacatctcccactctggaggtattaactcaaatcctgatggggcatcgatggcgtggccgatgctatgttgggagctagggcttcgcctctgcctgtgtggtgtgtattccagagggacacaggtcaaaacaagtaaacacaaacattcagttataaatcatgaagtttctgcaaagtagaatgatatgggggtgggaacagcatcacagcaactgcaaaggcccctccaagaaaatgacatgaagcagatgcctgacacagatacagtcagctgcatgaatgaacctagggagctgcgtgctggctgcaccccaggcagaactggggtggaccccagctccaaagccgcaccgtagaaagcggaaattctgaaaatgttttaaaaaaataattagactcgggagaacacaagacccatgaggatacaggctggggaacactcctttttacaaactgcaggcatgacctcgaggtaaggtgagaaacacagagagccctggagagcagtccttgttctagcaccttccaccgagctcagtaacacgacagtacattttgaagcaaagggaaaaatcatgagatgttgcctttaccagataactcatcttgctaaggcacctttacccctcgtggtcttgagggttctgggaaggcattgatgaggacctccagtacgtccacccagcattttattatcataagtgcgaagcttggttacaattttacaaaataaaatgaaggcttcctgattcctagtccctagttgggataacctccccaaagcaagcctggaaaatccctgggcggccaggtcactggggctcaaagtcctcctcctccccgccccacccacccatggaaaagtactggcatctcagcggctgggtttcttccaggaggccctgctggggatgtgtcagtgcccccaacccgaagcccacagggaaatctcaccccactgggttgagccccaacctcccactctggccccattggtttcacacccttgaacaatcctgcccaaataacctagcagctaagtgtggccaggggccaggaaaaaagccctgaaaagcagtgagctcttcagatccgagagctcacagcttggctgggacgctgcccactgtggaaaatggaacgtgaagatctggtacagtgagggtggtgggggagggaagccctgaccccacccagcctgcgtaagagcagagggtcaacttcccagggtatctggaaagctctggcaagggtgggcagaggtgggtggcgatggggccggcggacacacggcctcgtgcttttcatgcgatgacacacctgactggccaggcacacctggacgtcggggcaggccaagctttccaacagtcactcactgttccttgagtggagaggcctggcagccacgctcctcacagacaggggggtttttctccttcttggtaggccacgcctcccccgggcacatactgcctctgtccgagggtttcgtccaagccctgggctctgaccacaaaaagcgcccttttctttggcgggctcacctcagacgtgaggtaccagagagccaaaccgtctgctaaaaggacatccccagcacatttctccctaggcagagggtctgtggctggcggccacaaacagcacatcctccctccatcctggggccttacagaattgccccttggttcctgctatattcatggcagaaggacagtaaactaaaggagctcttggcttgctcggggtgctcccgtctgacccaaagcaaactgggtaaatccctggtaaaaaccaagttgttgaacacagggcttcaggtcttggcccattcggtgtggccattcccactccaatgtctctgtgaaaatgcaaaaataaataaataaataaataaataaataaataaataaataaacacgaatggcgacaccttcctccagcagagagagattacggcctccaccaaaacactcaatgggttcctggcagggcttccaccccaactgtggacactagatagagagatgctcttcatgagagtcttgagggttccttgttaaaaaaaaaaaaaaaaaaaaaaaaaaagtgggttttttttggttttctttttttggtcatacaaaacgtagttgtgaaaggaaaagaaaatgccagccctgtttgacagacattagatttatgatcgttttttaagcctcaagtacgtcacaagaatcggcccacccactgcactgccctgattgtaaacacggccaagtgcccatccctgctcttcccctatcggacctgggctcctccgcttctgaacagcccttgtttccctctcctggtctctggtgggttaaaaagatgcctggctgtatatatatggagagcgtacaccatggagctctctgagctaaaacctccaagacaaacatagcccgctcacgccttccccgtctgccggcaggccgcagatgttaataaacatggttggggtttagggtttgcccactgattcctccatccattttacactcgacaagtcaggagagcattttttcccccttcccttaacgtacaaactcagtaaactgttgtaaggcttggcaacaaacttatgaattttggcctccagatgtggctggaaataaaagtaaacacagggtgtgagcaactgcgtttcaggtttgtgtcctgtgaggctgagtctgcaaaaaccagggctcagagagactcatttgccctttgccatgagacaccgggagatagttttcctaaaggtagggatgctgtttggtgcagacaacagatgtagaggtccactagaaaatgtaggtgaaggtttacagtgcagaaatttggccccctctccagagcaccattcataatccatccctcttggccagggtgggtcacagtgtgtcctacagcaactctggctagaacacaagtctataggaggaaagtgctcagatcagaaaaaaactgaaaaagccttatcatgagatccatttctggtaccattcctacggaagcaggacagagatgttcaaaaagaaagcaaagggtcaagtgtaaactgataggtctacttcaaacatgaatcaataggttttgtttgattttacaggtcgaaagacttgtggggcttgagggcctttcaaatcagaagtccagcttatctatccatagcaagaggaaggacagaaaataccacgcacatctgagaaatgtactgcgtatataacttgcaattataagatccatttttcatcttgcagatgaagattggatcaggtaaactactgatccaatgtctggagataaattattattatcttcttttctgggactgaacaaagatggattgtaaggaccactgtccccttgttaacatatatgcccagactgtcattttcccccttgctaagaagtcatttccacggggggatcatcttcagtatgtgcagttggtcaagacttcacaaatatttcctctgaattgtaaccaagaaaaccttcgctttataaatttttgttttattactttgctaaagcaaatacacaccaaaaaaaacacatgtggtattccacttcagtcaaacactatgcctagagctctatctcttttttttcttctaaagaaaaatcacaaatgccaccttataaaacagtacatttcagatgcccatggtattttctgtcctctttcttgctataaatagataagctggacttccgatttgaaaggccctcaagccccacaagtcttttgacctatacaatcaaataaacctcttggttcatgtttgaagtagacctatcagtttacacttgaccctttgctttcttttctgaacatctctctgtgtcttgtttctgtaggaatgatacgagaaatggatctcatgataggacttttttcagtttttttctaatctgagcactttcctcctacagtcttatgttctagccagagttgccagaggacacactgtgacccccctggccaagagggatggattatgaatggtgctctggagaggggtccaaatcaattttcacgcaggtgaaaacttggaaaactactgggaattgtggctttgggggggtctttagctatatgcttgcaacttaccatgaaaagaaaatggtttggctgttatatgtatggatttttcatcttgttttgtgttttgaatgaaactttaaagggcatgttaaaggctttcacttctagataagaaatcatagaatcatcaaattctatcctcagaaagactcatggaaggtcaacttttaattctctgactctgtactttgatgtaattaggggctacaagcccttcagtgagctggctcagcttgtagaactgaaatgtacttttctatttttggaattaggtgatgagatgtgaagactagatgtaaaatgtaaaacattttaagatgttacataaaaatctggattcctggatggtcttgaaaaaatgagaagatctggcaatcctgcacctgtgttcctacatagaagcaaatcactaaagctgagaagctgctacctctttaaggaagcgtgtgtgctctccagtgtacgacaatccacatcatgctaaagcattggccttattcattcatttggctcttcttcctgaaccttgtagacatctgagtttagaattcctggttaaaaaaaaaaaaccatcttcacttgaaggttcttgtttgatctttctcatgtgaatatcaaagatggatatgaatatgcaacacagcttggtaaaaagagcctcacagataaaagcgaatctaatatcaatgatcaatactcttagaatttcccagtgcaaatcagtaaaactttttggtgctttgacatgttgaaggtcctaaccataaaacaatttggttggatgtggcttagagctttgcattatagatgttacttaacaatagcaaaaaggaagccaagaaagtatccaagaaacacatcttacctcccaacacacgcacatttgagttaccaccatatgtgggtcacaatactaatgtgttctcaagaggcgtataatctttcaaggggcttacaatagagcaaaggtgtgtttgtttaacagcatgggaaccagtttgaaggggctcccagtggccaaatctgggacaatatgagcaccaaaataattaagcaaagtagtgataggtgaaccattgactaattaggaattcatgagcccataccaataatgaacagacatacagacaaataaatagggatacaaataaaaaggtctcttgctaacagtggaatgccaagagccaaacagtaaatattgagggagaactggagttggaaaatcatttacaaccatcatggtgaagacctgatcaagcaagaatcatcaccagatgctaaatctgaaaggcagtctttgagaatgagaatctttgcatatccttaaagtgtctctccactgattgcttattagctacaagggaggaaaaacacattaattgtacagtgaggaaatcagacaacatcttacatgggtaatcaaaactgacatcacccatcagaaagagatggacattgggtacctccagatgtgacatactgagaaagatatcgcatcgcctatgcagcgttgtagccaagaatccataacttcaatctaatcaaaagcaaacttcaaacacaaatggggaattttccatttaaaaaaatggaggagaaactatagtcttcaaaaatatccatttcatcaaaatcaaagaaaggctatagaaatcttccagattaaggaggctaatgacacatgacaatttaaagcaatatctgactctacattggattttgttttcaaactttaagttctgggctacatgtgcagaaagtacaggcttgttacataggtatacatgtgccatggtggtttgctgcacctatcaatccatcgtctaggttttaagccccacatgcattcaatatttgtcctaatgctctccctccccttgccccccacccccgcaacaggccccagtgtgtgatgttcccttctctgtgttcatgtgttctcatcattcaactcccacttatgagtgagaacatgcaatatttggttttctgttcctgtgttagtttgctgagaaccatggtttccagcttcatccatgtccctgcaaaggacatgaactcattcttttttatggctgcatagtattctatggtgtatatgtgccacattttctttatccagtctagactggactctgtactggagagaaattgtgtcataaaggatagcattagatcaactgagaaaactggaacacggaaggagattaggtaaaataattgcatcaatgtaaatttataaaggcgataacagagttacggttctataagagaatcgctcttcttaggaaatatacaccaatgtatttagaagtaaaggcccatgttgtaggagcttaccctcaaaccgtttaggaaaaaaactgcagaaagagataaagaaagataaattgaaaaagtgaatggcgtacaatgttaataacaggtgaatctgggtaaaggggttatgaatgttctttgtgatgttttgataacgtttaaaattatttccaaagtaaaagtttaaaaaaaaaagtgtgtgcacgcgcacatatgtgtataaaagcaagacagcacatgagcacacattaagtacaaatctgtggcacaagccactcggaggtgaaggagggagtaccactgattagagaggtcagaaaggttgaacatgggtctgagagacagggcgctcttaagagttgaaagggttgggcttttaactctaacaataggaaccagcatcaagcaactggagcctccatggctgccgggggaaaaaatactgcacagaatggactctatatgtcaaaagggaattgattttaaggctagagagactgggagccaggggtggacccaggtaccaggtcaaggagctcactttcaggatacagtctggtgtggaagcagaaaacctcttagcaggaggcaacatatgcataacctacaggtatgtaggctagactgcagtgacaggcaatcgggaaccgctgcaaaagtctgggtgggtggtcaccaaatatcagccataaattcctgagaggccacagcactgacattagggtcccacaagacccaaggcacattaagcattgttggaagattgaatatgtaatttcttacacaaacatgttgtattttccaactcctacagaccactattttccaaatattcactagataaaatattaaatcattagtcaataggagcctgtgaaacaatgtagtactaaacaggtcttcaacgttcaaaagagtgagcagctctggagatgaggtctcagcctcctggccagggcattgccatggagatctgtccaggtaggagaacaatgcctttggttcacttagaacacacctaaagatggcagcatgtaatgtactctgagaaagtacagagaggaacaaggtaaagctcttatttttaaaaagctagtgttatggctcatgcctgtaatcgtagcactttaggaggccaagttgggcagatcagttgaggccaagagctcaagaccagccaggccaacatggtgaaactctgtctccactaaaaatacaaaaattagcctggtatgatggtacacgcctataatcccagctacctggaggctgaggcaggaaaatagcttgaacctgggaggtggaggttgcagtgagccaagatcacgccactgcactccagcctgggcaacacagtgaaactctgtctcaaaataataataataataaattaaaagctagtgttacaggtaaggcatttaaatcatggtgacaagctgagtaagagcaaaaaggtaaaggaataaaaacagagtttaatgttgacatccagacacattattttaccctaatgagaaaggcaggagcctagagcagagcccagcctggaaacgaggacaggggtatgctggacttcaaggatcatggacttgaagtgaacgtacagggggccacacagagctgacacttggagaaatctcaagggctcagatgcaaggttgggagtgatttttatgaggggtgtggtcaaaaccacggcaggagattggacttcagagcagaggccaagagcccaagctcatccctgtttagagagcaggaggtgggatctgcaggagcctgtgggtagtcagtactgaaccatcaggagctgagcaaccacagggaagaaggaccaaggaagggcaactagatctgatgaggtttgcagggtaccaaaccacagggtcataaaagctggacttggatttccaagaagaaggaataggtgagtggttaatataagatagaggattcccagaaatcccgacctctctgtagaaggaaggaaaatattaaagggcagtgcccaagataagtttaaagctaataaaggcccttatagaggatcacagacagagggtcagagagaagagagggagtaatgattcatatcaattctcagttgcacccacaattctctgggctcagctggggagagaatcacaacccaagacttgggcaagaactaagcagcaactgcttgggagggatggggtcggggagtgtgagcaaaatcaatgtcagaaattgtctgaaaagagtcaaggtgaggaggaggcacaaacaaactggagaggctgtgctcctcagtgacctcatctctatttgtgatttggggagtaaggggttaagagggatcagggaaagtcagcacagaagtcgctagaggaggaaggcaggaagagcctgcacttcatggagaagggcagggaggaggctaccagccaggtaatgtgccctgagagaggtatttttattccagtctgagccccgtcccttgtcctcaccccattctatctgcatatcatttacctgtgtttagttagaaaccatggtaatgaggaagcctgaagaaatgattgaaatattaggaggataccaggccaccacgaggccacacttctgttttctggggaaccagatcccttaggaacaaagggtgagatgacaggtagcccgcagcagtctgttccaacaaccggatttgccctttatgggacaaatgagctgcctgtggtaaaacaggggactagagataactgaagcctagattcccaatgctgcaccggctctggggctcttggagcccctcctgccaggtctcacagtcctgcgcatcctacaagcgggaagcaaagaagttcatccacaaatgcaggaggaacctgacctagactctgctgctgctcttggatctgactgaatgattctgcattcttctccccatccatccccagtgctttatttttattcttatttctttttaattttactttaagttctgggatacatgtgcagaacgtgtaggtttgttacacaggtatacatgtgacatggtggtttgctgcacctatcaacccgtcatctaggttttaagccccacatgcattcggtatttgtcctaatgctctccctcctcttgccccccacccccccacaggccccagtgtgtgatgttcccctccccgtgtccatgtgttctcattgttaaactcctacttatgagtgagaacacgcagcatttggttttctgttcctgtgttagtttgctgagaatgatggcttccagcttcatccatgtcccgcaaaggacatgaactcattctttttcatggctgccatccccatcattgtacttatgattgagcaagatcccatagaaaggtgctacaggctgaatgtttgtgtctctcccaaaattcatacattgaaaccttaatccccaatgcgatggtgtttggagatagggcctttgggagataatcaggtcatgaagtccccatgatgggatcagtacccctataagaagaaatatgagagagcttcctctcgctcccccactccctcacccccaaccctgaccttgtgagtcaagaagaaagtcatctataaaccaagaagggggccttcaccaagaatctgaccacgctggcactctgattcttggacttcccaccctccagaaccatgagacataaggttgcttaacctgcctggtctatggtcattttgttatagcagcccaagctaggaaaagaaagcaaagtctttaggaaaatgcacggctgtgagctgagtgtccacttctccacggacaagatttagagcaactcagaatgtcccatggctgatggcaggcacacagtggtgccacaggaaattggctcaacccacactggtggcataacccaggggtccctacctcttgggccacagactggtactgcccatggcctgctaggagctgggctgtacaataggaggtgggcagttggggagtgagtgaagcttcatctgtatttacagccactccccatcactggcatgaccgcttcctgtcagatcagtgacagcatcaggttctcataggcacgagaaccctattgtaaactatgcatgtgagggatctaggttgtgtgctccttatgagaacctaatgcctgtcagtgatgatctgtcactgtctctcatcgtccccacataggaccatctagttgcagtaaacaagctcagggctcccactgatttacattacaatgaattgtataattatttcactattatatgtaatatatagtgaaataattgtaatatgtaataatactaatgtatgtaataaattatatactactaaaatgtaatacataataatactagaaataaagtgcacaataaatataatgtgcttgaatcatcccgaaaccatctccccaaccccaccccaccccatccctggtccatgaaaaaaactgtctgccatgaaattggtccctggtgccaaaaaggttggggaccgctggcataaccaacataaacaaaaacacacactcaggcccatctttcaagctccggctttaaggacattttctgccttgatttattaaatcctgcagtagacagcatgtgaaagcccagtgccgaaggaccccacagacttccaatggggtcagctcccctgaaaccacaagactcagagacccgtggtgttccaggaaccgatttaaatgtcgcttgaatcctgaggattttactttattatttttttaactcttgggaaatggtatgaaatggctgctgtcatccttgcagcatctgcctcccaagcccactgcatgggttctcccaacacctccccttggctcccctcctggccaagttcagaagtgtgatgggctcaaaggaaatgccccagcgcccacaggcacccagaggctgcgtgcaccctggtggtccctgtcgaagcggtcacggctcaccgccagacacccttggtccttacagctctggctctgccagccacagacatcttcaaacagagcccatgaaaagaaacactgcttcagctttgctcccaccgccatcctgggacccagggtccacaaggagaatattttcttaaagtaactccctgatttgcgggggtttacctgccgtaggggaaattttttaaaaaaagaaaaggaaagcattaggagcttctgtaagagcagcccaaggaggggaggggaaaagaaatgtcacccttgctctctccagacccgcctgaatttgaggtttggcacaaataccaagacagggctggccaagagaaaggtgtggcccggtgaaggacatgtccaggagtccagcaactgtaaacttgaatcccaaccctaacctcgcctaactcccagccaggactgccagtgactcactcatctctcttgccttggtggcaccatccagtaaaagacaggacttctgacctcactggggagcaggaagattagctcatgtttataaagcgctttgaagattaaaaagcctgtgcctaaagggggctattattattataactacctgtgaaaaaagagaaaaaagattcccatctaggtctaatattagctctcatacagagccagaggggcagggaggcactgacttcgtggcagctcatacttgtgcccctggcactaagacggtgcttcccaaagtttgggatggggaacatcatgggggggtgcatgggttggttttagagggtgggcagacagcacagaacagtgtgtaatcaccgaaggagaaagcgactccctcttccattctctttttttttttttttttgagatggagtctcgctctgtttgcccaggctggagtgcagtggcacgatctcggctcactgcaacctctgcttccccggttcaagcaattctcctgcctcagcctcctgagtagctgggattataggcatgtgccactacacccagctaattttagtatttttaataaagacggggtttcaccatgttgaccaggctgttcttgaactcctgacctcaggtgatccacctgcctctcaattctcttttaatcctactgattccatttcaggagaaagtctccatttggtgctgctaggtctgtaccatctctccctggccaatttcccttcattatagacagagcaataacctccctcaaactcaaaggttcggcagacaactgtagctacctagaatttataaacattgttttgatttcattgtgctcattatttgtataattactttgaatctatgagaagtgatactgattcactacatttcactttaaagttacatttctttttttttttttttctttttccacgttcaagcgattctctcccctcagcctcctgagtagctgggattacaggctcctgccaccacacccagctaatttttgtatttttagcagagatgggttttcaccatgttggccaggatagtctccaactcccgacctcaggtgatccacccacctcggcctcccaaagtgctgggattacaggtgggagccatcgtgattggccaaaatcatgattctttaaattggagtttctcaacctcagccctattagcatttggggccagatcattctttgtggtggaggctgtcttgtgccttataggatgctgatcaccctgtcctgtgccttgcaggatgctaagcatctttggcctcctcttctcaccagatgccagagcatccctccaccacccaactgggacaaccaaaaatgtccctagacattgcccagtgctgtctgggggataaaccccaacccccaacacctcctctgttaggaactactgcttttagatcaattcactaaaaaacaaaaaaacaaaacttaaatgtgttaaatagtaaggttgtactaaaatggctccagtttaggaaaacctataacagagaagcagtccttctcgcccatgtctgctccagctcctgagtcacgatctaatgcctccagggcaggcctgtgctctggagccctcgtagccaaataccatcatcccagtggctccattcacggcaggggtcctatctgtgctggctgattagaagagctttaaccatttctggaagtcataaacaagggtgtttggaaacaattttcattccaggccccttccctggtgtcaaaccctgcttatcagatcttgaggtctcagtggacacctgcttgtcatggctggagcaactgcctagaggccagagaaaggaggctcacgggggatcaatgggaaacaagggtgggcccattcaggaatgttgttaagtcccagaagggccttacaagaaagatctagtcctttcttccaccttatcaaaggagaaactgaggcccgggaagaaaggctctatgatgtgtgccgggacagatgcagcctgtaacagaacatggcgtagaactcaaggcttcctccagtattaatgttctccaacaccacactgtgcatggcaatccccaggctaaagaaaatgtcactgccctaatactcaaaataggaggcaaaggcttacacatatgctgcttttgacgtttaaaactcagcaagagcaaaactacacaaatgaaataattaaaatctgcattggcagccacccagcaggcagggggacagcctgctccatcacctgctaagcccccagcacccaacgggcggatgcctacgagcagctgctatcagaggctccttggcatgcctatcgtccggctttccacgggatgttttcctttcttctgcctctcctatctggcattttctttgagacggagtcttgctgtgttgcccagactggagtgcagtggtgcgatctcagctcactgcaacctccccttccccggttcaagtgattctcttgcctcagccttctgagtagatgggattacaggcacacgtcatcatcatgcctggctaatttttgtatttttagtagagacggggtttcaccctgttggtcaggctggtctcgaactcctgacctcatgagccacccgcctcagcctcccaaagtgctgggattacaggcgtgagccaccgcgcccggtcccctctggcattttcattccacacctccttctcccgagattacaaggaagttaaattgccaaacttcctggttcatgcaaagttaagactgtccattaaatagacgccagagaaaataaagtctagttttgaagatttggtatcagcatggctcaaagtacttctctgtctcagggaccagcaccaggcttctaaatgaaatcacaaccacaaaagaggcttctggggccttcagcaaaacatgctcactgtcctccagccctgtctctgagggtcccctctctggagtgggagtagaggctctctgtgcacttccaaagacactctaggaatcaacttttattattcccagtgttcagatgagaaacctggaggtcacacataccgtaaatgacaagaccgtggactgaggctttaaccagatttgctcgttccaaagcctatacggctaccccctctacatgctgcttccctataagcaaagctaacgttgcctggagatccttactttgtagtttggaaagccaagcccaggtaagctacggacagatattaacaaggcaacttatcattgcgatcctatcaatggtctgggccatcaatcaatcaatcaattaatattcactgaacctgccacataaaatcccagagttagccatgcagggaccagccaggcatgggagccacggtctaaccaagaacccagtgttctcacacaagcttagagagatggcacagggcgatgcgtgattgattgctgatgaatggcacagttactaaatgctataaagtccagagaaaaatctgagagttgaagctgctttgtggaagagccgagacgtgtagctgggcctggaatggtgagaaagacacagatctgcacagaggatccaagaccaccaggcaagaacacagaattccaggcccttgttcatgtcctctgcagcccagacagaaacgctggtcaggtctatgccataagcacgtccgggaggctctcaactgtctattcagtgtgacacacccccctccaaaaacagatacacacacatacacacaaacaacaacacctgaactcatttctgctcagctttagaacgtaaatgattgtttttaaatgaacaaatttctacttcacttagaagagcttgacaggaggtggcatttctttattcaaaaagaacctgcgacgtccctattacgggtcagtgctttgctgggccctgggaatagagggaggaataaaagatggatcttgctcttaggaagcttcggggctagactggaggaccttgaaggaagatgaaaaataaacaaaaattctaaaaatctatactacggagaggttacaacaccgcagttcagaacagcaccacttcccctccccatccctgacatttcccaggcctttctggttttctcagtgcctgtgtaaatgtggtccctggtcccagacgcctgattcattcattctccatgtttgatgacacaggaaacccctgagaatgaaggaatcaggggtataacaggccctaaacaaagccaagatgagccatgtttgtccccgagagaatcaacagcccctgtatgaaaagagtgctgtacagtgggatgggacgaggcaggttttataatctgattaaaatcgcctgtcggcagttttccgctctcctgctcaccctaaatctacaaagaagctccactcctggaatcccacacaggtaaaccccgtgacctggggaggatgtttgttgaagagttgtctctcgtggcgccaaagagtttgggacaatgtaggtgtccatcactgggggaatggacaggtctgtctggatcagaagctagcaaactttctctgtccagggccagatactatttaggctttatgggtcaggaggccccagtcaaaattcctcagctctgccacaatagtgagaagatagccatggatgacagggaaatgaatgggtgtggctgggctccaatcacactctatttacaaaagcaagtggccaactggatttggctcaagggccacagtctgctgaccactggtctagaacattcttctcccaagtatctgcccagtctctgttcaaatgttatctcctgagaaaacctttcttggccacactctttctttttcttttttttttgaggcagggtctcactctgttacccaggctggagtgcagtggtgcaatcatagctcactgcagcttcaacctccccgggctcagatgatcctcccacctcagcctcccaagtagccgagactacaggcatgcaccaccgtgcctggctaatttttgtattttttgcaaagaaagggtttcaccatgtttcccaagctagtctcaaattcctgagctcaagcgatctaccctccttgcctcccaaagtgctaagattacaggcgtgattcaccgtgcccagcctggccacactcttttttttttttttttttttcttgagacagagtttggctcttgttgcccaggctggactgcagttgtgcgatcttggctcaccacaacctctgcctcccaggttcaagagattctcctgcctcagcctcccgagtagctgggattacaggcatgcgccaccacgcctggctaattttgcatttttagtagagacggggtttcttcatgtcagtcaggctggtctcgaactcctgacctcagatgatctatctgcttcggcctcccaaagtgctgggattacaggcgtgagccaccgcgcccatccccggccacactcttaactgtgccctccatcactctttatccctcacccctctcttttattccacagcatttatcacttccagatcaatttgtctatcagcttagagtctgtcttcactctagtgagggagagcaaaggtttttttctgttttgttggtcactagcgcccagcacttagtaggcactcagtgaatatctgttgggtgaatggacgagcagctgccacgttcatctgtacacgtcacccaacaatgtgtgtgcctcgtctttcagggctagagaagtcctggaaaggtcagccaggttgccaaaccacctccctgccccaagggaggctgcatgcaaaactaccccatgcagatctcaatctatctttccttccttccttcctctcccttcccttcttcccttccctcccttcccctcttcaccccttcccttcctctctctttccctttctgtccttctctctccagtgaaacagggcagtgagatgcctgttggtaccaagtcccagagggtcatcactctgtgctgccactgagacaattccaggagccaacagcattttcttttagaatctgccaatcttttccaaacattccacagaggactttaaaagagagaaaaaaaaaaaagagagagagagagaagtgaagaaaagtgactcctgacagcccaccctgtaaccaccaaaagccagtcccacttctctccaggagactgataaaagaattttttctttttagcagagaataatattcacctctcttcttctagctattgtgggtttttcctccctaaattccaaaaccaatctttcagtgctgacatagtaaaatctgccttcctaaaaaacctcagggcttttcaagcagccaaaaacctcaaccattgcacagcccacaagattttgcagaacagattataatccccagcctccctctcctcctcgtgaatcacaaaccagctaaactccagtgacagattatggagctactgctctgaaccctccatgggtggagggagaccagacaggattgctggctgcagaaagaaaatcattccacctcatctgtgaaggaaccaaactgcagcttttctctaaagcacaagttgatggcactttgatgtatagtgttccctaacaccaaggccactcatttttttttttacctccttgctcttgtggacatgatctatagcaggggttcctaacccccaggccatggacgcattactgctccatggcctgttaagaaccaggctgcacagcaggaggtgagtggtgggtgagtgagcaaagtgtcatttgtattgacagccgctccccattgctcacattaccacctgagctccacctcctgtaagatcagtgatggcatcaaattcttataggagcgagaaccctattgtgaactgcacatgtgaggaatgtaggttgtgcattccttatgagaatctaatgcctgatgatctgtcactgtctcccatcgcccccagatgggactgtctagttgtaggaaaacaagctcagggctcccacagattctatgttatggtgaattgtataattatttcatattacaatgtaataataatagaaataaagtacacaataagtgtaatgtgcttgaatcatccagaaactacccccaccccaccccaccccaccacatccacggaaaaattatcttccagaaaaccagtccctggtgccaaaaaggttggggattgctgctctatggagccccatgcggcctcaaagtccctcaactctcagtgtccctggaagacttttcggctacactttctgtccaaccggttctgccctttatttttgtttcagggaggattattgccatggcaatgtccaggtgacagagtcaggagggggaagaaacccacctgtattcaacccttaatcccttaaagcctgtcagaaagcagcagccttggaaaataagaagcctggccagtgtttcctatcgatcacaagacagaataaaccagaaaacagctctccacgaagaagccttggtcagtcaagtgtccctaggggctctgccaatctccctgcataggagatctgcccaacacacatttgcattttcagaaagagcagagcagaaaggaagcagaaagccaagtctgtggtggggaaaaaggaaagtgggtttcccatgagattcaggtagctccccaggaccgaaggatcagctgggcacgtgtgcttcctatctgggtagtgctggtcatttctgtttgctgtggccacagtgtggccatcctatcggcacctctacccaagagtgggtggagcaaacaaaacaaaattcagttcctgggtattagcttagcacccagtccacaaacctcctctgcctctgaggaggtgagaggcccttaaagctacgggcattcacaaagaaacaggaggaaatgaggaattcactggaaatttttgccgtctatgctaggaggaacatcccaggtacccacagggactatcaacaagtatccaccccaaaaaatagattcaataaaacaataaacttacaaatatgaacttgtaactgtggtttactattcttggggaagtctgttttatttcttttcttttattatttctttgagacagggttttcctctgtttcccaggctggagtgcagtggcacagtcatggctcactgcagccttgaccttcagggctcaagcaatcctcctgcctcagcctcccaagtgcctgggaccacaggtgtgtgccaccacatccagctaattttcaaatttgttgtagagatgaggtctcactacattgcccaggctggtcttgaacttctgggctcaagtgatcctcccgcctcggcctcccgaagcgctggggttataggtgtaagccaccgcacttggcctgttttaaataagtgttgtatacttgtgtgtgctggaaaacagctatccagaaaacaccacggatagacaagcttccccaaccaaattgtgttcccagttcatgcgttatccactgaccctcatttaaacttggttttggctccctgtgtttttcatttcattgttaaggaggcatacactagatccttcctcttcttgggctcagttatccacagagatacaatattttaaaggttgtcatgtccttgcctggcttatcaaggaagtaagggacagcccaagggcttcccaggtaaggaaaaacaacggttttataaagccacggctggtgacagtgcaaaaggaaaggctgcttccattgtatctggtcattgggtttgctgtgtgcctatcaggtttataaaacaaactgcagcagtgagaggctgtgagtgagctctcttccttcccctattaactatctatgcagtaagaaggcctgatgcacccatttagctgggaatagctgccagaactttaaggctgatgcctgggagagagtcagtgggcggcaccgggctggctttctgaattcaatcagaggtggccagccccctctaaccatgatccaaatgtacatgccagatgaggagccgtcgtggttgaacagggaatgtttcatgcaaatcatgggtttggagcaggattttgtggagggagcatccttgagaaaaatgttgggatggctacggactggcgggctattagtcacagagccaccacctcctccatgaacgatgaaagttcttaccaccctggatgcacagatcagcagttaataatgaggtctcagcatggaggagacacattctttcacacacatgcacacacacacatatgcacacctgcacacacatacatacatacatacaagcatgcacaagaagtcttagagccccatctccttttggctgggattttgcatcctgagaatcttgggtgttacccatgggaacaagctcctccgaagccacacatggttgaaactcctctcccagtgacaacgacgtcacgtctcccaggcactggctcccttgggaatgtgtgagttgctcccctggggcaaagagcagctgctcggggtgactcataaattgtgctctcagccctgtcacccactgtgcctcccgtccattactcagccttctccctgcgcttgttcctatggctgcccctcaacccagctcaccgctgctcccagctcgctcggcactctgcaaggattggcatttgcttcgggcagactcttctctgtccctgccttctctcctccatgagacccaaggcaacacaatttgccctttgaggagttgggagtgggagcagagatcggggtgacaggggacagagagataaaggcaagaaaagaatgttcccttcgttgaaaaacagttcagctccagggtcacctctttgaaatcatcagtgacacctcactctgcgtactcccctcaaacacagcccctaggcattgcttcttctaggatctgggatttttgacactgaagggtcctggctgccttaaatcctttctagaagaaagtggaatgaggcagagtataaacagacaaatacacccaacaggtgaaataaaacttgagcttcttaagcaatgctctgtttctacaggcagctcccacttgtggaaaggcagagggatgaggagggtggacatgagtcaagcctcccccttccactccccactgtcaacccccaccctgacccattcaacagcctagggagttccctgcttaagggaatcttagaacacacaccctctgcaaatacctacagcctgtgtactgaaacttagagattacttctgaaaaagtgacatcatcaacagtacaggattctcaaaaactcagtccctgtttcctttttacttctgttattttaaaataccaaagatacttgcattttcttcttttccaactgttagtgaactctattccaatcagcattaagcccagcaatttttgtactaggtacctactcctacactccctgtttaataatcagtcatctagaatagggactggcaagctttttctgtaaaggaccacagagtaaacattttcaactttgtgggccatgacatctccatcggagctactcaactctgccattgtagcatgaagcacccatagacaataagcaaatgaacaggtatagctgagtctcaataaaactttattcatagacttggaaatttacatttcatataattttcacatgtcacaaaatattcctttttttgattttaacttttaatgtggaaaggattcttagctcacgagctgtacaaaaacaggtggcaggccggtcttggcccacagactgtagttagccaactcctggtctagaatcaaatatttaaatggaaaccctgagagagctctttcttttgaaaagaatatgataatcgtgataatagctcccatgtattgagcacttgttccatgaaagaacttgacatggaaaaacggcttttcatcctcatattaacatatgagacaggtaaatattttctctgtgttttgtggaggtagtcactgaaactgatgagaagaaaattaactcaccaggttcactgcagcaaggattggaacctgaagtgcaattccagacagagatacgggatgcacgggttcagcatccttaaaaacacagattcctgtatgttaaggaggtgatgagaaggaggtgtctggggagccaccccatgggatttatatcacttgttcagaaaaaccttccatcaaggctaccatgaaggagtagtcttcctgcccaactcctaaacatttcgctcaagtgaaacacagctcagatggactccaagaaccctttagaactggggagagggaggagagtggatgcatttgacaaatggttaagggccaccttgtactgggggtcatagaaggtactgaacggtgattgagaagccaactgcagggatgtgagccttggctcattatttttggctctggcagatgcctgggccccctgcccctgtgagtactaccccaggatgcccagaagcagggttctgtctccacgtactacccccaacaggaggtctctgcgtccagcagcctccgcttccaaatattccccatttctgctcttcctctaggcccagccctccccactgtcagcctccaaggtccaggctggaggcaaaatgtcccagagctgagtctgctgccacccagagagaattctattcaaaatgagggccctgggaaagagttgggtggctgctttcagttcctcttaggcccgatgcctgatttcttttccattctgggcaccaaggctcatctggacagaagagcacactccttggctgcctctgggcccaccacacccggtggaaaggcacggatcctggatataaaccgaccaaagcaagacaaggccgtctgctggagccgccctccgccctccagacacgcacactggtttcctaatccttgggatttcaggaaaaggaggcccgacccgccacggcactgagagggagggagagagggagagagagagagggagagggagagggagagagagggagggagagagagagagagagagagagaccaggcgggaggcaagcttctcattatgtaaaacacttggctcattcctctttctctgcatcctgctagcgattttgtatccggtttgggaattccaggaacatctgcaattgtcttttgcccaaccacacatgtgcaagctgtagggctcagtcatgttcctacctgcggtgccctgtcattagccctgaactgtgtgtgctttctctcctcagcagcaaaacatataaaaccctggccggcgaccacacctgcaggactccacctccccgcctcctcccactgagaccaaaggcagagagaccaagtcacctttccgacagtgagaaatgccagggcgaacagggcttgtctgaacagtccaagtcctctaactaaacagacagtacatttttaacacagcgttctcccctacctctccctgtttgtgtgggaaggcctggggaggccgggtggaaaagggtaggtgcaattcaattcaagactctcagaaggggtgcttgcttgctttggttctacttcagccagcactgatgacctccacccagatcagaaaggaactctttggactatgagtctccaaagtgcaagaaacattgacctcagaagccagcgaccacctcttcttgccactctgggtgtggcaagatggtataaaaaataatgcctactattgctgtcttccgaactaaaataagcaatgcatagaatgcatttgaagactgaatggtacacagtgtgcagtcaaccagtttgttatgaatattcatgattatgatcagtcctcatcctctttgtaaaactctttccctcctccccttttgcgccatgctgcacactcctggcttccttccccagtcccactgtgcttcccatgtcccctgatccccactggcctccacgcacctaaacactgcagtgttctccaggaatccatctctccttagtctcccagctctcccactatggacccatcccatgactccatcttttgctgggtgtggatacacacccccagtcccttggcacaaagattttggccaaccctgggtccagctccaccctttgctcctacctgtcttgcagcactgctgacactgtcctgtaatttcttcatatgcttatctcacacatgtctgatcagcaagactccatgcctgcatttatccccacaacctggtattatgtgatgtgcagtaggaacccggtcaccactgtttaaataaacaaagcaccacccctggcctctccgcctcacctcaaatccccatctctagaggtcaagtagacgttttcccaagcaaaagactcaggcgattccaggaactcaccagaacccctcctgtgtcctccatctcagcttattcactgcacccagatcttagcacaggggagacagtcaagaagtgtgtgctaaataattagggaaagaataaccatttgtctagctcaggtttacacttccgacatcatctcgggtgcaccctctctttccccacaagcattctgaccccatgctgtcaattctaccttcccagtggcacctgctttcatccccgctttgtctctgccactgctgaggcctgggcccttattgctgctcctccagtccaccagccagccctcaccgccatctgtccctccctaacctgctccgagaggaccaggccaggccaattcctaactcacaagcttcccaagcctcccacactcacaggccagctgtagaaaccctgtcccttcttggccccacccaccatttcaaccccatctcctccgtgacccccatggctccagtcccacccagctacttactggtcctgggaagccctgtccagattcacctccggtcttcagctcaaagcaggcttcctctacctgaactggccatctcttcttgcccactacagctcaggccttaacagccggcgagccttcagggcctcctcaaaactcctctctgacaactctccctgtcttccccagacgctctggccacattctcacactgaagtcagggggatcacgtacccagaagacacaagccagacactctcctttatgtgatgtttgtttgccacccgcctgaagataggcaccggatcttacacttctgggcctggaaaaaaacatcttccacagagcagatgctcgtatattacaagtatctatttatacatgagtctatataagtgcgcttcccttctccccacccagtcaccactggagtaagccttgtgcaatttaccagtgaccacctggcaagccacagggcccccattttgctcacatcaggtaagactcatactatcttagggagcatctagtttggtggttaacagtgtgtcatctggaggcttcccccaggggctttcaggaaggatagcaaaccgaggcatgcctctcaggactctccggcccccttcagctgcaccattcagacgtcccacagattccattttcacttaagattttgtttacacaaagggatggctacaatttgccgtcccttcgtgtaaacaaaatcttacatgaaaatggttgcacaaataagtggctacaatttttttaactaaactatcagtgtactccaaccagttcaccttatacaagagaagagagaggaccagagagggaaggcaatttgcccaaggtcacacagctagtagggggcagatctccctccaaactggccaatgcacttacacctgccaaataaggccacatcccagggagaggccctgcagcacacagaagagaagaagctgcacaaaccagggattccccccagtttccaaccatgggttccatcacctgcctcatgttcctcagtggatcattcaagatctcctcaaaggtagaggggtctcaaactcagcagtctgcaggaccaggtagcaaacaggaatgtagcttcaggtagcttcaggaaccagttaccaaacagaaatgaatgaagctggctggacataagaattaactagaaggttagagaaaccatgatgaacccaaggcactttgcaactcacaaagtccatagccaagggaaaaccctgactcagagtcctcaatgggcccactttttcaatcaaagccggagatccaaaacttcataggaaatatctaccatctcaaaagtggcagctaactcaaaccattttagcgccaggtatcagtaaaaaacacacccatacccaggcctctggactgttggtttgtgaactctgcccctaaggaatgtctttctggttgagagagcagttaataagacagagatgcaaggtctgagatcctgaggttatggtgacccttgggtctgaaagaagctttatagaataagatgtaactttctctctttttttttttttttttttttgaaagggagtctcactctgtcatcctggcatgacctcggctcactgcaacctccacctcccaggttcaagtgattctcctgcctcagcctcctgagtagctgggattataggcacgtgccaccacacctggctaattttttgtatttttagtagagactgtgtttcaccctgttagctaggatggtctcaatctcctgaccttgtgatcctcctacctcagcctcccaaagtgctgtgattacaggcatgagccaccgtgcccggccgatgtcacttttctaaaactgaggtgatttcaaacaacttacacaaatccagttcttgtatccatggtgcccagacagcagcttgggatatagagtgttctggggaaaacaggcagcagaaacaaaccagtcatgtttttctaatgaaacccttaaagtgccctccttaagtcagtccggttctgattttagagtaataatgacgacaataaattaaagagaggagtcctagcagtttccagcctgaagttgttctctgttggaacatcctaaaattcagacagacataagtaggagaaatgaccctagttatcagggccagcccatctccactgcactttgcatcccgtccataaaacaagatgatttacagatacagagggagggacctctcgcttcccctctgcaaaatttattcctctttaatgagctgccatgcctctcccttccttctaatctcttcctccccttgtttgctcaccctcttctgcctctgcctttgcctcctccaagggagagtcagcgtgtccaggtggcaggatgctactggtagaataaaatggtttaggaacaaaagaaacaagtgaagttggcagaaggagggaagctatcttcagactgaagaggttggactggcagatgtgggatttcctaggacccacctggcttttattggggaaagaaacttattaaagtgaactatcccacctctggtgaagaatcagaatgcagtgcacagtggccaacgggggatgggagaatggcttcccataagggagacacaaatgatttctgctccttgcacacagctttgggactaatggggaccaggatctataatcagacaccactgtaataaccccacatgcttaccctttcttgctcccacctcccacttgtcttctccaataagtaatcaccctgagccctggaggcaagaggttagaaagtgagagaagggcttgaaagttacatgcctgttgatgaagattcctgccttggactatgagaaggtctcctctggaagagagtaaaaaatccctcaacgcaaataataaaaaacacttttttgatatatgaaaaaatgctcaacatcattaatgatcagggaaatgcaaatcaaaaccacagtgcaataccaccctactcctgcaggaatggccataataaaaaaatcaaaacataatagatgctagtgtggatgtagtgaacagggaacatttctacactactggtgggaatgtaaactagtacaaccacgatggaaaacagtgtggagattccttaaagaactaaaagtagatctaccactggacccagcaattccactcctgggtatctacccagaggaaaagaagtcactatccgaaaaagatacttgcacatgcatgtttatagcagcacaattcacaactgtaaaaacgtggaaacaacccaaatgtccatcagtcaatgagtggatgaagaaactttatatatatatatatttttttcatatatatattcacatatatattcatatatatgaatatatatgaatatatatgtgaatatatatgtgactatatatgtgaatatatatgaatatatatgaatatatatatgaatatacatgaatatatatatgaatatatatgaatatacatgaatatatatatgaatatatatgaatatatatgaatatatatatgaatatatatgaatatatatatgaatatatatgaatatatgtatgtatatatatgaatatatatgaatatatgtatgtatatatatgaatatatatgaatatatgtatgtatatacgcatatacgtatatacataatgtatatacgcatatacgtatatgcatatatgtatatacgcatatacgtatatgcatatatgtatatacgcatatacgtatatgcatatacgtatatacgtatatgcgtatatgtatatacgcatatacgtatatgtatatatgtatatatgtgtatatatgtatatatgtatatatgtatatattcatacatatatgtatgaatatatgtatgaatatatacgtatatatatatatgaatgatggaatactactcagccataaaaaggaatgaattaatggcatttgcagcaactggatgggattggagactactattcaaagtgaagtaactcaggaatggaaaaccaaacatcatatgttctcactcataagtgggagctaagctatgaggatacaaaggcataagaatgacacaatggactttggggacgcggggaaaagggtaggaagggagtgagggataaaagactacaaactgggtgcagtgtatactgctcaggtgatgatgcaaaaaaactcacaaatcaccactgaagaactcactcatgtaaccaaacaccacttgttccccaataacccatggacataaaaattacaaaaataaaacacttctttgtcatacttcacaaagctccttcatagccatgagcccatttggtccttttaacaacttcttctaggttagtatgacttcatcttatgaacaaaggactagggctcagagaggttcaatgacttgggccaggtcacacagctcgctagtgacagtttttcttactccaagtctagaattattcctacttaacgatacctacccaggttgcttgggatcaggagaccaggaaaggaaaggaggaaaaaaaaatataaaagagaaaaatgcaatatccatggttaaaataaaagatgcaaaggtcaaatggaatttttgaaagtacttctcagacaacactgagaaacagccaagcatgtatcctgctaggtcttatttttcttttcaacaacaagatattttttccccctctgcatcccaaaattatgttgtctctcttcccttcaggccccaaatgccttttaatctttgcaacaactctacaaggaggagagggttggggcggaagactgtcaggcatgatggactccagattgcccataacttcatcagagaccctctgcacaaactccccagcggccaagtaacccagatggctcctctgggactgttctctgagtgagacaaggcaaagtcaagattgtgctgtggtcttcaggctccagacccccaggtgctcagaaagaagggtctctgtggactgggtctgtgtgttgcttcacgtggatccaggacacacacccccactgccagacagacacctgtggccatttgactgagtttgctggaagtgaaatgaggatttctgaagagtatagcctggtgtgagctgtgagaatctcacagtaccggggagagcctgtatgaagatagaattgagaccaggtgacctggcaaaagggctccacccaccctgagtaaacttcaaggccaacccacatctcagacctggtagaccagtaggctggtctctctctctctctctctctctctctctctttttttttttttttcctatttctccatgggaacttccatgaaaatgtgctgactgcctctgaccctactaaaaacaatgggaaattccaagttttcacttttgcctcttgaagttgcaaggcaacttaccttgcaacatcgggaaaggctggttcattatactagccttagagatataagtactaggtcctaaactggaccctaacccgagctttgctcacatagaggggaaggccttggagagaatgaaatgagacccttacgggggaagcgcaccccctcccttaaaagactcgagttcagacatttagtttgggagctctcagctcccgttctctccctcctgggttgctcaaccctccctcaggtacccagcctggatccaggtctgcccacaaggccctggaaggtgttagctgataatcaaggcagtcatttaaccatctatctgcctaagtgtatacaactcctcccagggacctctgcaggctaagagaaggttctttttgagaaaaaaaaaaaaaatgttgcaaattcaaaggaaaaatgctctgatgcagggtttccccatcttggtacaactgacactctagagtggaccattctttgttgagggggctggccctgtaggatggttggcagcgtccttggcctctacccactagattcccagagcacccctctccccacaaagctgtcacaactaaaaatgtttccagacattgccaaacgtcctctgcagggcaaaattgcccctggttgagaccactgatctaatggcagaagttggtacagagctgagagcgggaggacccatttctgaagccccatcagataaccacctgggcagctgcccggccaggtttgcctgcaagactctgatcacagagcattctggagacctcgaggtgaggcagcagagggaacaaaatggcccttctacctcggaagcaaaggccaaggcaaagtcaggtttccagagctctcaatccttggcaggggcaggggaaggagacgtcgaaggcaaagccggactcaaacgtttcagagaaaccaagggccacttccaaagtccttgcctttgaatggagatggcttgtctcactgctgttttcttttctagtccttctttattcaccgtggttaactcctcctctcccaaggtgtccgtttgtccctcctaaggaaaagcctcctagtgtttgtcagtctaagaggaaagagaaacctgaaaaggcctgggctgcttttaatttacctgggcaggtgtctgtgcagcctctgaaactatcctgaagttggagtccagctgggaccctgattaagatgcagagaaaaccagagaggagaggagaggagtgaggtggggggcgggggcgggctgattaattgagaaaaacacaaccatgccgtgtttgaataagattgcccggtggaatgcagagcccttttttgtgtgctcattcgtttgaaacaaaagcgaatagagggaactacaaaggggtcagggggaggggagagcggcagccaatggattcctgcgaacagacctcgtgtggggggacggaggcgctaccttggcaggcacttgtcagggcagtcacgggcatttgcagatgaaatcttttccacacaagtccttaacttcatttttcattcctattctaccatgaggagttcatctccaaaatttaatcatttaaacttcctctctagaccagcacggtccaggacagaagcctctgggcaatgagccttagaaacatggcaagtctaaaactgagatgtgctgttgagtgtgaaatacatgcctgattttctacataacgtatattttctcgataatgcatatcatctccctaatactttgttttatatcgattgcatgttgcagtaagattggggatatactggggtagagatcaaatatataactgaaattgacttcatctgtttcctttgtcctcctttcggtgtggctaccagaatgtctgaaatcacctgcgtggcttgcgttttatttctcttggacagcactactgtaggtggatgattctgggtagctggtctctctcttccaccctccctcctgccctggattgcagaccctcctcagattgtctggatcctttccatgagtatatcaatcttcattcatttgccaaagacaatttgcgtgcagaattttttctgcacacaaagcactacgttgacatctataggagacccccaaatgaaaataagacttttggataggaggccaaggctccgaagaacctgacaaggccccttaagaagcaaggctgagagagccagccccagggctcccactgacagagaaacagcgaagccttctcccaggcctcggctgccatattggactgattccaactgagcagccggggaaggttagttttcatttcaccttccacagagaagtggcttttctggttctgcttatcttccgggtgacgctaaccctgccacctgttgtccttctatagatcacagctttttttttttttttcccccttctgacacaaggattgtatggttttgagagaagaccctgtgtttgaggagatggggtgtcaggtcctggccaccgacccagcaccttcactggccttcagctttggtttatggcaggcccaaaagaaggcaatgggaagtggttaagaagggcattctcccaggactttgggaggctgaggcagatagatcacctgaggtcagtagtttgacaccagcctgaccgacatagtgaaaccctgtctctactaaaaatacaaaattatctgggcgtggtggcgggtgcctgtaatcccagctactcgggaggctgaggcaggagaattgcttgaacccgggaggcggaggttgcagtgagccaagatcgtgccactgcactccagactgggcgacagagtgagactctgtcaaaaaaaataaaaagaaagaagaaaagaaaaaaagcagcagcagcagcgctttcatgggcaggcacagtggctcacgcctgtaatcccaacacttcaggaggccgaggcaggcagagtgcttgagctcaggagttcgagaacagcctgggacacatagtgaaacccccctctctaccagaaatacaaaaattagccagatgtggtggcatgtccccatagtcccagctactcaggaggctgagatgggaggatggcttgagcccaggaggcggactttgcagtgagttgagatcatgtcactgcattccagcctgggtgacagaacgacactgtctcaaaaaaaaaaaaaaaaaaaagaaagaaagaaaaagaaaaaggaggacattcatcatcccagcccactgcatggactttgaagagtattttcatccaaaatgtccaagttaaatatcagtggtcggtatgatctagaagaggggttctcaatggagaaatattgaccccctctccaacgggcgtttggcagcatctggagacatttttagttgtcacaatggggaaggtgtacgctactggcatccactgaatagagaccaggggtgctgctacacatcccccccaccaaagagaattgtctagctcaaaatgcccatagtgccgaggctgagaaactccaatctacaatatggaggagaccagtatcctccaacccccaccaccaccaagccagagcttgctctaatctctggcatcaggagtatccatcctccttcaacactaccttccaacgcacctgggagtgaatccaggaaaacctgaaggatcaggacaagaagaacaacagggagaagaaaaacagcacaaacatgattaaatcaattagtcccgctaattaccaagtgtctaacttagcacctggagcaacagctggggttgcacagaattgagcaaacatcatccccaacttgggcaggctctgggcatactgacttgctcctccctgccttcttctggcaaaagactttgagtgagaaaagactaagcaataaagtcctagagcagagtgaccgccctctggaggcaggttcaatgccacagccacatcaggtgcacctgcccaccccactgaggacattccccgaagagacaattgcacaaggcagtaacacctcctcttgagctgaggtcctggcttcccaagctgctgacgtctgcaaacaacctccatcaaaaagtccagggagatctcccacctccatcagtattgctcaccctacgcttatgaaatatgcaaagagaatgagattgcctcttctccccactctgcttgaactcattctactctgttcctctgggtctgtgttttctcaatttctcaattataaaagacctgtcatttgttctacaaggtgctcccacaaagacccacagccctgcatcttgatgctatgatttccctccttggaagtggctgccactgcaaagtcttaccagaagcccgctgagctggtagcctcccccagccactcagtggctccacactaccacaatgcagtaaccagaccctgttgcaccatgcatctcacagctgcttcctccttgtcaccactgaaatgcagctgtccacagccacgtggctgcaggtaaggtcctccaggattccactcagggaccacatttaattttgatttaatacctgctgttgaagttattctcccaggttccatattttacctggttaactggtggctcccaaaagatatgtccacatcctaatcccaagaagctttgactatctccttatgggaaaaagggtctttgcaaatgaaattaaggatctcaagatgagatcatcctggattacctaggaggccctaaatccaataacaggtgtcctttataaaagagagagcagaagacagacacacagaggaaaaggccatgggaagactgatgtgatgccaccacaagctaaggaatgcctggggcctccagatgctggaagaggtaatggaggattcttccttggagcctttggagggagcacagccctgctgacaagctgattttggacttctagcctccaaattctatatttgtgtacttggatattatctatctctcccatttgaatatatgctccttaagggcaggggcgtgtttgcttatttactgctaaaactccagcaaggagaatgcctagcatatagttagctattaaaaatatctggttggggccaggcgcagtggcttacgcctgtaatcccagcactttgggaggcggaagtgggcagatcacttgaggtcaggagttcgagaccagcctagccaacatggtgaaaccatgtctctactaaaaacacaaaaactacccaggcatggtggtgggtgcctgtaatcccagctacttgggaggctgaggcaggagaatcactagaacctgggaggcagacaatgcagtgagctgatatcgcaccactgcactccagcctgggcgatagagcgagactcagtctcgaaaaataaatacataaatatctggttggatgaatgaagtcatagtccatattttcaaaagcagagatagtctagaacatgctactatatcctaattctggagcatttctgcaaataaaaaaactccctgcatcttccctttgggttaccaaggatttttacacatatcacactgacccccctgagaaatctaccctgatttgtcttttggggaaaaaaaaaatgggaattttctctgaagggaaattcctgtgctcctggtggataaataaagcacattgcctgaaatgcccctaaatttttaataagtgttttaacatcatttattacatctcccattgctagcactttcttaaagaaacacaaattaagaggcacagtaggtgaacacttggggaaggggatggttcctcaacaggcagaggtcatgctgaggagcaaactgatgctccccagtgttggccaagtggatggtcaacactgagatttgcaacatccctgcacctggggatattcataacgttgacatcacaaacaagacctcttctttagggactccagaccaaagaaacctccgtgtaaaggaatgacattccttggtcgatgggtagctcagcccagataagctcaacaggacccccaataactggccatagagcatgctctggtctttccagaaggtacaaatggggccctccctcttcaccctttcctaagatttagatgtgctagtaacatcatggtactttttgaggttgggataataagtaaacagaagtcttttaagattttgatgcagggaacattaacaggagacagaatttggagtagcaggagaatttgaaaatgttaaagaaactttgtccttccaaagaaagccaaaaatattatttgcacttcagtctgcatttgtctggaatgcttacaaaactaattaatatggtggcttcttttttttgagcttccagttaaaaattgccgactcaccattttgttttcctggcccggggacaatgtctgaaaaaaagctcttccctccagagatagagaaaagaacaaaatgagcccctctctgctagggaaggggaagggatacctctaagtagagcacattttaacatctgctttaggctgaaatggtaccacacacaccaaaatccaccatctctcatcacatttcccatggagaactcagccaataaaggaagtgacatctcaggtgttggtccgacagccatcccaattataaaagctatctccattataaaagacctgttatttgttctgcgaggtgccttttgccccagctgtacacaaagggcagcaatggcataaaatgatgacgctggagtagtgacagccggaatgtcgccatgacagtcagaaaaggttgagatgaccaactagcatccctccctgggcaggcagatgaaaaagaaaaaactcagtaaaaacaaaggttggatcatgtgtttcttaactctttaccagttccaaaaagagctagggtgcctcccttgctaataacaagaggaagagcagtaaaaacagtcatgaaacacttccatgagaggggcatccgccctggacactccacaggcatccttttaccttcccactcaccagcgccagcctcaggagggggcatcatggtcccggtgctagagatgaggactttgaggctcagatgaatggaacagccatttgcaatgaaattattgtttggtactgctgggtgctgtattcgtttgttctcacattgccagaaagaaatatctgagactaggtaatttataaagaaaaggggtttaggccaggtgcagtggtttacacctgtaatcttaacactttgggaggtagagatgggtggaccacttgaggtcaggagtttgagactagcctggccaacatggtgaaaccccatctctactaaaaacacaaaaattagctgggtatgttggcacacgcctgtagtccagctactcaggaggctgaggcaggagaatcacttgaacccaggaggcagaggttgcagtgagccgagattgcatcactgccctccagcttgggcaacagaatgggactctatctggaaaaagaaaagaaaagagaaaaaaagaaaagaaggaaggaaagaaagaaagaaaaagaaagaaagaaagaaagaagaagaaaagaggtttaattggctcacagtttcacaggctgtacaggaagcaggaggctgtcatctgctcagcttctggagaggcttcaggaaacttatgatcatggcagaaggcaaaggggaaggaggcctgtcttacttacatggcctgagcagatggaagaaagagagaggaaggggcgggtgctacacacttttaaacaaccagatcttgtgggaactcgatcacaagaacagcactaggagaatggtgttaagccataagaaaccaccccatgatccaatcatctcccaccaggccccctctccagaactggggattacatttcaacatgagatttgggtggggacacggatccaaaccctatcaggtgtcaacttggacaacccaagattcttcaaatatttatcctccccagttatcctgaagctgaaggcattcattcgcaaacacttttacctcacaacctcttctgaggatcccactcattacccagcttttccctatacctctcagcattgccagatcccatccccagcaacgcctatcccctgggaaagaattaatgcagccaaagttttggaacccacggttctccaaatcccacactttggcatgaaaaatggtcaatgtttctaagcaccctaggggtatttctcttgctatcatgatgatacaaccagaacgtaggcaggaccaccagtcacacccatccaggagcccaccttggtgacccacaatttagcacccctattttcattcctggtcagtttgtccaaatacgaagccaggatcagcaaagttcttcagtgaaaacccagagagtaaatgtgtttggtctggtcagccacacgatctcagtcgaaactactcaactttgctgccgtaactcaaaagtagccacagagagtatgcaaatgaatgtaagtggctgtgttctaataaaagtttatttacaaaaggtggcaggctggatttggttcatgagttgtagtttgccaacccctgtattagactgtaagcactctgaggtgagggactccgtccttcagttctctgagtctttttcagactttgtccagagtcctgcttagacaagggactttgcgaatgtctgctgcctgcaaggaagttccctggggatccacatgggaagagagagtagtgggaaggacagaggctttagaatcacatacacctggatccaaatcccagctctgccacacagcagccatacattgtggtttcattgtcctgaacttgagttgtaaaatgagaagagcactacctaccccatagaattgtgagattcaaattagattaaatgttgataacttaaaaataaaacatacaaggagtgctgagaaagtaggcacaaggttaacatatggctggggaaattttggataaccgttttgaagtctgtccatctatctatttggggtgtcatctatctgtatcaaggactattgaaatatacatggccaggcgcagtggctcacgcctgtaatcccagcactttgggaggcagaggcgggcagatcatgaggtcaggagatcgagacaatcctggctaacacagtgaaaccctgtctctactaaaaatacaaaaaattagccgggcgtggtggcgggcgcctgtagtcccagctactcaggagggtgaggcaggagaatggtgtgaacctgggagacggagcttgcagtgagcagagagtgcaccactgcacttctgcctgggcaacagagcaagactccatctcgaaaagaaagaaagaaggaaggaagggaagaaaggaaagaaaggaaagaaaggaaagaaaggaaagaaaggaaagaaagaaagaaagaaagaaagaaagaaagaaagaaagaaagaaagaaaagaaagaaagaaagaaagaaagaaagaaagaaagaaagaaagaaagaaagaaggagaaagaaagaaagaaacatatttctccttataaaaatttatctcaacaaaataatcacggatatacgcacaggttttgttacaaggatggccattgcagcaacgtttttaatttttgctactttcaacaatctaaatgtccaaccacaggggattatttaaattaattaaagtacaccatgcgatagaataccaggcaattgaaaatgctgtaggacagcagttctctatgcacggtccctggaccctgagagtttcctgtaccctcttctggcagggagggcagtctacaagataaacactactttcataataatatcaagatgctgaggtcaggagttcgagaccagcctgaccaacatggcaaaaccccgtctctactaaaaataccaaattagctgggcgtggtggcacatgcctgtaatcccagctactcaggaggccgaggcaagagaatcgcttgaacccaggaggcagaggttgcagtgagccaagatcgcgcattgcactctagcctaggcaacaagagcgaaactccatcccccacaccgaccaaaaaaaggaaaaaaaagatgttattgcctttttcacggagtacatctgcaccaatggtccaaaaaaaatggcaggtataattatcaacactttagcatgaatgaaggcagtggtgccaaactgctaccccacactcacaataaatatatattaatgcaaatttcacctaagaatatccttggtgatgcaataaaaatagtcaatttaataaatcttgacccttgagtatgtctcttatttcaatactctgtatgacaaaatgggaagtgtgcataaaacgttcctggcacatagtggaatatgatgtttgtctcaagagaaagcacttaggggagtattaagctgccagcaaaaccagctgcatttttcactgaacaccatttttacttgaaagaactgacagacaaattctgggtattcacgcttgggtatctggcagacatttgctcgagaatgaattaagaaagcctgccatttcaagggaaataataacggtgaaggatgatacaatttgagctacaataaagaattataatttttaaaaatttgtcttcatcaccatgaacttgacagattcccagttctgacagacctctctgatatcgagggtgaggttaaagaatgtgattctttgacattgtaaaatgaaatgtatttatatttggaagatctgtataacttaattgaattaacattttccaaatgactaataaatgatgtttcaaaatctggcatgggtaaaagatccattcaaagtgcaaggctgaataaatattaatgtaacagaataagaaagttcattaaaatgtttttttaagtttacattgcaaccacctttaaaaagactaccatttgtcaaatttttgtgaaatatcaaaaaaatgcataattatctgaaaaggctatgaatatacttctctttcttccaaatacatgtctgattgaggctggattttcttcatatactttacaacaacatgtctttatagatggaatgcagacacagatttcagaatccagctattttctcttaagccagacaatatagaatttagcaagaatataaaaaatcttactcttctcaccaatttttgttttggaaaatatagctatctatcataaaaatatgatgttaacatgcaattgatttatcattattttaaaataaatattttttattaatttttcaatttgaatttctaatatagtaaaaatcagtagttctgaccaacataaaaaaaagctctttgaggctctcactaattaaaaaatgcaaatgagtcctgagaccaaatgtttcagaatctccattgtagaagaatatttaacaactagaggaaatacctacaggacactgttaagtagggggaagtcagactgtaaaagactctggcaaatacaggtgattttatttcatgttttggggtgggggggttctaattttctagaatacacaatgcatagatgaatagtaaagaaatgctttcaaaattatttcaggtcttgccccacttagactctctcaggaagtctgtagacagtgcctaacacatagtaggtgcttattagctctttcaggtggcctaaaatagtttttcacagacagacaatgactaattggcttagcattagtgtcctctccctgtcatgctggagggatgtttgtttgcttaacaaaaagcctcatactttaaaatatacatgcatatatatttctgagcataaaatatatatatgttaaagtatgtaatatatatatatatcacctacacaaatatagcatttaatcaacgcttatatttaatattattttctaccacgcaaagaacaacatttacagtacaccttaggcttcaatgtagaataacctgattcctaaaatagaatctattttcttctgggaagtggaagagctactaaattctcaaacgacaacaacgtacgatgatttcaattaaaacatttcttttttaagccacaggagatgctgggaaagccataaaactcaacccaggttggaggtgaggagtcctaacatctaagagaaggttgagaacggaagcttgaatttgtttactttctgtgaacaggaaaaataatcataaatagcaatgctcccatatcattagaagatgctaagaaaagactaatttaaaaaaaagaaaaaactgcctggtctttggtcaccttgttcatgctgggtggccttgagtaaccaactctgagatttctgtttctgcagccgtaaaaataagctaatgagcatttccagggggccaacgagcgccagaatgctaaagaccaaggtggttggttcagaagaatttctggaatgggcatcctggctttcagaagctccagagacctccagcctggcacccaggaggaatgattctgaatctctgctccctcctgcatggagaacctctgggaggccagttttgaaacccattcttgttgacatgcagagcagccagttctgtttcccccggccctggggcccagcatcacggcccctgaggctatttcctggtcagacccaaggcatacacaagaccccttctgaggttttccgtgccacctctccgggcggctctggcaggtcgacattgctcccttaggctgcataattagcaggcttccagtcgccatgtggttgtggttgcccgctccaaacacagccctgcagccccctcctcaccggcgccacctccaccgccagtccacacacgtccccaccctttcttcccccagccgcacctcaccaactgtgggtccccacacggcagctccagggctgctgccacccctcacattgacacgtttcctaatcctctggcaaacgcagagcaagtccacagaaccctgctgtcaccacctcggagccaaacttagtctcaactcatttagagactttgcaagctttggtgggaaaaaggaaaatgcagagagctcagactaatctgtgtctatcatctagatcctgccctcttcatcccacgccattctccctgcccctccaataatcacaaatcccactattagaaggtaaagttttaagaggtcatttcatctatccctctgtctttgggtaggactgtcttcaaaatacacattaaaaatgctctgtctatgtctacagggctgatgccacagcctcctcctttgtataggtgcatgggcagttaacctacaggtgaatgcacagtcaagttcacacctacgccttcgacaagcaacattaaacatacaaccaaacaccatctgtacctgtctccgtgctgactggggacactcccctagaccacactgacagcctcctcctccccacccacaccatcacaatgtcttcttcaagtcagcatggaaagggcaggagagcacacgagttgatgagttttccattttaaagaatagggacgagcaaagcactccctctcctgtgtttgaaagtttacttgcagcttcagcaggcaaagggctttttttaatataataaaaaaagttatatgactttaattaaatgcacttattaaaagggtgaaatatttggagaggctgtttttgtgctggaggcacattttccagcgtgctgtagagcgtctgcatccgcccgctctaggcaatttttaatgcacaaataaatccgcacctgacgtgctgacagattattatgcagtgtggcagccaacaaaagtaaacacaggggcaagttttaacctcttgcagtcacagagctttccctgctgggcccagctcaggtgtacaggactgctggcaaagccttttcttccagttaggcatcttcctgtccaggagcccagccttggaaacaggaggctgtcatcctgtctggagtgtggcataagccacaggacaggagacgaagggaggggatagagaggaacagcagcaccacatcacattccccaagcaccctgccttccatcctgtttatactgtggccataagatccacaggcttctgccctccgtcgatccttccagccggcagagctggctgtgcagatgtaatgcccagccaggtgcttctcccagctctgcccaatgtgaaagagtcaggacagttactagagagctagagggtaatcgggcaacttccaaactttggactttaagttatggacatgtaaattagcatacagtcaaggcatttcctgaaaccaaactacagaactgctcatcttctgttgctctggttagatagggcttgcaaagcgacactcctggaaaggcacatgttgcaatggtcagaggctttggttttacttgcctggcctctgtgacatagctcagtgggttcatttatttttcatatcatgttttagctccatggctactagattttttaaaacctaggtttcctcatctgtataatatgccttcggctgggggaaggagagtcttgggatgaaggcgtgttctcacagtctgttggggttgacattcactgatccattagtctattactctgtcactaagatcagacagttgtattctgcatctgtgaataataacagctcttgttattctaatttatttggtgtttactacaatccatacctgatgctttaatacatgctctcattttatcttcaaactctccaaggtccagatcattaatctatttattatcaccactaatttgaataggcaccatgttgcccagtgttcacagttatccaagcttcatcatgttcattctctcaacaatcttatcatactcagtttacagaggaggaaaaggatgcttagaatgtgttattttgcccaaggaatccattacatgagccaaaataaaagcacaagtacaaaaaagcaaccacatcaaactttaactcactagaacatagatattgcaaatatagagcagattaattaggaccactgaagaaatatccttgtttttttctctataaataagattggggacccatatacttatttttaaaacaacaggaaaagttttggcacaatgaaatgtgatcaaataaacagaaaattcctgcagtgggtagaaggctgggggaggtgaccttcaagaaccctgccaacacatctcttcggtgaaccgattgctttgacactggaatctaccccctgcccctagaatttgggggagaagctttggcacgagctttacattagcagcatctccattcacattctacctcttcatgacactcggattgaatgttctctttcatactggctgagaattttggggctgtggcaaggaaagaagaagagaatttagcctatagattctctttgtttgcatactttccctctggtctaggaaagaccagcaaaattctgatcatcacactgaatgcttctcccaccagcacccaggagaaccagttagccattaccaggtagatcatgtctcttgcacacatttgtcaacctcctgagtttggggaatgccccacctcatgaaacagatgctgacacctgctactaaggctgacaatgccaggcccttctattgccagcctcccttgcatctaaggcaagaacaccaggcttaggtttccctagtcagtcacaactatgcccaactttgagctggaatcagcagaagccctgaaagatccactctggtgagggttggggtaacagcagaaagtatttgagtactttctaatttgaggctattacaaaaagtgctactatgaacgttctagctcatagaacactagtggcaggagctatggtgtacaggaattctggcaaagcactggtgtctctctaagcaatggcctgcttagagagagagtgattccagtgaagcctcctacacccagtgtcagtggtgtaggctaagatgggtgtgcccaccggtaggaatgatatcatcatcagaccagcttttctgtgcttgagacatgttcttggcagcagaacctccaaacctggcttccttaccctcatggagatgctaagctatacaatctgcattttttttttaagagatggggggtctcactatgttgaccaggctggtcttgaactcctggcctcaagcaatcttcccatctcagtctcccaaagtgctgggattacaggtgtgagccaccaaatgcccagccacaatctgcttctaataaaccactctttgtcttaaattagccaaaggtgatttctgttgcttgcaaacaagaaccctgatggatataggatcctgtacaaaaaccctggcactggtgtttggaagttatacagcactatgtctgttcaattggtttttgtgttgttttgctttcattaattttaactttttatggcaataacatatacaatagaagaatgcacatttcatgagagtacaggtcatcaaattttcatgaaatagacacaaccggctgggtgcagtggctcatgcctgtaatcccagcactttgggaggctgaggtgggcggatcacgaggtcaggagatcgagaccatcctggctcacacggtgaaaccccgtctttactaaacatgcaaaaaaattagccaggcatggtggcgggtgcctgtagtcccagctactcaagaggctgaggcaggagaatggcgtaaacccgggaggcagagcttgcagtgagtcgagatcacactactgcactccagcctgggcgacagggtaagactctatctcaaaaaaaaaaaaaaaaaaaaaaatagacacaaccatgtaacaggtacttacatcaagaaacatatcattaccaatccactcagaagtccacttcctgctcactttgtctttaccaccaaacaaggacagtcactctcccaacttctgacaccacagattaactttacctattttttgaactttatgtaaatatagtaatacagtgcatagtctttatccggtctaggtgtgatctttgttatctgtttatctgtcactcaacattatgcttgagggattcctctatactcttgtgtgtagctatagctattcattttcattgctgtataatattctgttaaaggaatataccacagttcatttatccattctactgttggtagtcatttgggtactctctaatttggagctaccataaaaaaatgctgctataaacattctagtacatatcttttggtgaaatatgaacacatttttgtgggtatatattaatgctcataaagtatgaatatgtttaattttagctgagactgcaaaatatattagcatgatttttttctttaagacagggtctcactctgccacccaggctggaatgtagtggcaccattatgactcactgtagccttgacctcgcgagctcaggctgtcatcccacctcagcctgctgagtagccaggactacaggtgcacatcaccacatctagctttttttttttttttggtagagacaggatctcactatgttgccctggctagtctctaactcctgcactcaagtgatcctcccaccttggcctcccaaagtgctgggattacaggcatgagccacagcaactgacaacaataatttttaattgaactctcaaaataatttttaccccaaaggcatgacactgggaaaggataagaagtgtaaggagacagatgtacgtaaaacttcatatggaggcatttccccgctttactgcagaggtattaagatctataaagaccctggtgttcggcattttgccactcggcttgacctgggttaaataactgctgacaggtcattgtgaaagtcaagggcacagctgggacaaggcatctgaactcttggccttctgacccagcagcagagaatcacacatttttgccagcaccactggccccagggaaccagcagccaacactagcgtctcacccagtatcaccactttctccagcatctgagaggggatggcttgcatttggagccctatcataaggcctgaatgcctccagaatcagcagtcacttaaattaggccaagagggccaggtgtggaggggatgaggtggggattggtggagatttgaataaattgagagcgaatgtccagtcttaaggagacatttattactcaggttgttgatttttgccatatgggaaaaaagaggccattattgccagattttctggcttttcaagggaggttagaaaacgttttttttttttaataagatattgcaatttgtgctgttggcaactaattttaagaagttaaacatggactactgttagccaggtgaaacacatctatggatcagatctggcccaggaaccactggctgaccatctccaatttggaaggactcagcatttcaggctcaaaggagagagaggtcttctatgactgcacagagcacacatgaaagaaagcaactgaacaccaactctggagagcacagatgcttggagtgtattccaaatcccctctctctcttacatggagaaactccctctataactatgacctgttttgttacctcgatgtcgacatcattaaataaagagcccttcggatcatgaacacctcagacaaggtgcctcacacttgaagaaaactgagtcttttttttgtttttcctttgcatctggccattatgtgtcctataatgactgcaggtcactgcctctgcccccagccctcatttctcaaggcagaatccatttgagttgacgacacctggagcggctaagcagcacttgaaaaacgatttacccaccaagaagtcatcaatgagaagacactctctttagcaaatcagaccttgtttccaatcagctcaatcttcatgcttgagttttcaacattttactcagcgaagctggctgcaatcacatgaatgtcaatgggctacttaattcttcctttctacttcttccccaacccataatcacaaataccatttctctgcctctgccctccttccctctacctgactgccctcagaataccacacacgcatacacactccacttacacatgcacacacacacgtccattcatcaattccaagaacgaattggtgggaacaatctagcgacaaacatatatgggaataggtttgcatttacttccacttgtcttcaccacccactttctagttcctagttaagtatcaggcatgtagtgagtgtttgataaatatctctccaatgtcctgtagttcctcagacaaatttgcaagacctcatgtgtgctattagcatcaaacagctgttttggagtgacatgagtgcttaccaaggatgtagaatctcaccacgccttgcagacaggttgagacaggtgttcaccaaacaaggaaacagggatgcaaaaagatgctgaagccatctgggcaaagggcagtttggagaggcaagaggaaaatcctgttgcaagatcccaagcctctaaaaccctggtgtgcctacctccacagtggctatatctcatccagtgatcatgacaattattcaataaattactatgtgttcaataagcattagctacatatcagacacttgacatcatgaacaaatgtaattctcgcagcaactctataaggctcactgaggaatcttaggataaagagcttgcccaaggagcttatcaagttaatctcagaggttcccaagggggaacttggaggaataaggtgagggaacatttggggttgtcacaacacacaggtgactgctgaaatgtagtaggcagggggcaggaaagccggagatctacatcattcaggtcttttcccacccaaatgccatcatcagcccagttgaaaaacactgctttttaagcaagggcagagccaggatctgcacctgcctacaagcaagtctgcctcaacagcccctgtccttccttaccattccattctgaggcttcaaagccattaatgtcacataagctgcttcctggtagaacaactaactgccctttcagtaacatctaggaaacttcagaatgtagagaacagatccagatctagaacaaaaatctgttctctccccaacagagcaaaatatacatagatagatttttttgtttatttgcttgttttagacagagtttcgctgtgtcatcaggctggagtgcagtggcacgatctcagctcactgcaacctctgcctccctggttcaaggactactcctgcctcagcctcccgagtagctgggactacaggcacgcgccaccacgcccagctaatttttgtatttttagtagagacagggtttcaccatattagccaggatggtctcgatcactcgacctcatgatccgcccacctcggcctcccaaagtgctgggattacaggtgtgagccaccatgcccggccttgcaaaatatatttaagatgtatcttccatatataaagcaaagcgctaaacagtgttgtgagaaagagcttctttctttttcaagacagaggcattgcttcaaaggctgcaatttcatacaagaaaaaggaaaggaaaagaataatgcagactgtgagtagcaccaaatgcctagtaaagatcatacaagtggccgggcacagtggcttaggcctgtaatcccagcactttgggaagctgaggcaggcagatcagctgaggtcaggagttcgagaccagcctggccaacatggcgaaacgccatctctactaaaaatacaaaaattagctgggcatggtggaccatacctgtagtcccagctactagggaggctgaggtaggagaatcacttgaacccagggggtggaggttgcagcaagccaagattgcaccactgtactccagcctgggcgacagagtgagactgtctcaaaaaaaaaaaaaagatcgtacatgttgaaagattttaacaccatgatgcaagtattcagagctggcttcatgcagaagggaggacttcagctaggtttcaaaagctggaactgattcccatcagcaggaaaggagggagagagagacaataaaatcaggtgtgcagaggtaagaaatcagcttgtcaagcttgaggggcaccaaggggaccaccgtggataaaacagagtccatttcatagcagacaggggtaaacctcaaaaggtatttgcacgggatcgaggaaggatttcatctctatccaaggattccaatctatcttgtaggaagtagcaatccctcatgggttgtgtgcaggagggatgaaagtggtgttttcaggaatgaacagactgcataagagtgggtgggggtgagtggtcagttagaagttctctcaataaatccagcatgagtaagagtctccatgaggtaggagcaacggaaacagccactgagccctgccaattccttctcaatacccgtttttgtgttcgattggataggaaccgttttgggggcctgagaaaagcagaagggttgaaccttacttcataatgtagaggttgataaccagaagaatgacagccctactgctgataaaatattgaggacagggagtttaaccacaaaaccttcaggaagaaatggccaggaaataataactgctaatgggaaatcagtgctgtggtctgcagacaacctggacattctcagacacaaaatgagacctctcccatcagccaggtttcaggagatgcagcagtggcaacttcacatggtaatctgctatgttggtggctcccagtgaaactcacctgctgagatccatgccttcatttaatcccctacccttgaatttaggctggccctgtgacgtgcttcagtcaacagaatgcggcagaaagtgatgctgtaccagttctaggcctaagccttctgccgtgtattagtctgttctcatgctgctaataaagacacacctgtgattgggtaatttgtaaaggaaagaggtttaatggactcacagttccacatcgctggggaggcctcacaatgatagcagaagacaaaggaagagcagagggatgtcttatatggcagcaggcaagagagagaatgaaaaccaaggaaaaggggttttcccttataaaaccatcagatcttgtgagacttattcgttaccacgagaacagtatggaggaaaccacccctatgattcaatgacctaccaatgggtccctcccacaacatgtgggaactatgagagccacaattccaaatgagatttgggtggggacacagccaagctatatcaagtctgtctagcagctatctaagaagtcaagctaggccgggcacggtggctctcgcctgtaatcccagcactttgggaggccaaggcgggcagatcacgagatcaggagatcgagaccatcctggctaacatggtgaaaccccgtctctactaaaaacacaaaaaattagccgggtgtggtggcaggcgcctgtagtcccagctactcgggagcctgaggcagaagaatggcatgaacccaggaggcagagcttgcagtgagccgagatcgtgccactgaactccagcttgggcgacagagcgagactctgtctcaaaaaaaaaaaaaaaaagaagtcaagctatcctctaggatagcttgagagaccacgtggagaaagagaagcccttaaatgatatgaaaaaagagagaaaggcctagtgtcctagtggcccagcggagcccagttccccaaccaattctctagcagaatgaagccttatgagtaaccactgaccagatgagcagaacaaccacccagccaggcctagaccaaaccccagaatcatggacaaatacaacagttgctgttttaagccaccatgttttgggatggtttgttactcagtaacagataactgatacacttccacgaggccatgggttgtgctggagtgccctggtgatccatgccaacaatgggatcatgcaaagctctgtgcacaggcaaatatatgtctatccttggtgatgggtagtgtgaacataaagagaagccatacagagccactgccatctgcaagtgctccctcaagctactggtgcccaagcttggcacatagttggcacctaaataaacatttgtaaaacggatgcagagctatcaatctgattttaatggactctagagaagcgtatccaaagcttacttattcctgcaaaccttcccagaaacttgtaaccttcaatgtcaggaaatgttctcataaatctgaccatactccctgaggctcctgaagctcatttcctcttgtccagtatgaatggataacagctggtcactattccaatatccactgacactgcaccttcctcagccttactgagttctcctctcatcaagaaagaagactactgcctttgcctccttgcaaacttgattcttttcaaccttttctagagaggtgctatttctgtttaacaagagcctcctggggatcttgttacaatgtggattctgactccataggtctggcatggagccacagattgtgccttctatcaagttcccaaatgatgctgatgtcgctggtccaaggactacactttgcatggctgcctcattttgcagataaggaaactgaagtgcaaagcgaggaaggctctaccaccaacatcagagccttaggcttgattgcacagacccttctgagttatgtgactgaaaccagtgtgggaaatcagagcaggtgtttctcagctatagtggctctagagcagctgctcccttgccatctaaagtcaggttggctaccttggaaccatccaagaagcttctcaaaatgcagattcacaggctttcctgctggagactgactcaatagacctggcctgtggccttgggaaattgtgtttccaaaagagctccacgggtgattctgatgcacagtgggtttgagattattcatctagaatacaagggaggcagtgaccccacaagagtaagactcaaaaatattagctcaccagtatttattaagagggttctatgctctgggcactatcctaatttaaatccatatcactttttttttttttttttttttttgagacggagtcttgctcctgttgcccaggctggagtgcaatggcacaatctcagctcaccacaaccactgcctaccaggttcaagtgattctcctgcctcagcctcctgagtagctgggattacaggcatgcatcaccacacccggatactttttgtatttttgtagagacggagtttcaccatgttggccaggctggtcttgaactcctgacttcaggtgatccgcctgcctcagcctcccaaagtcctggaattacaggcatgagccaccacgcccagcctcgtatcatatgatttaaacttcgctacaactccatctagtaagtgctatcataagtccaaatttatagaggggaaaccaaggcacaaagcagctaaataacttggcaaaagtcacatccctactaaggggctgagaaagggtcagaagccagttcgtttagctccaaaatccacctgttaaccactatgttctcgacctcttatctaaagtgaagataagctccctggaaaatcccaagagtaaactgattgacaggaacagtgtttctcaaagcagaagccggcaggcgcggtggctcacgcctgcaatcccagcactttgggaggccgaggcgggcggatcacgaggtcagaagattgagaccatcctggctaacacggtgaaacccgatctctactaaaaatacaaaaaaattagctgggtgtggtggcaggcacctgtagtcccagctacttgggaggctgaggcaggagaatggcgtgaacctgggaggcagagcttgcggtgagctgagatcgcgccactgcactccagcctgggtgacagagcgagactccatctcaaaaaaataaataaataaataatcagaagccacacaccaccagccctacagaacattaacgctcactcctcggtggggggaaatggtaggagatgatctcagtcaaatttgggaacagagctaaacacctcatgttcttactcatgtggaagctgaaaaagtagatctcataggaagtaaagagtagaacagaggttattcaaggctggaaagggcagggggaaaagaaggatggggagagatttgttaaaggctataaaattatagatggacaggagaaatacgttctagtgttctataccactgtaggatgactacagttaacaatgatatatattttgaaatagctacaagagagaacattgaatgttcccaacacagagaaaggataaacgtttgagatcatggatatgctaattaccctgatctgatcaatatacattgtatatatcaaaacaacactaggtatcccatacatttatctacaattattatgtgtccatttaaaaataaataaataagggccaggcgcattggctcacacctgtaatcccagcactttgggaggccaagataggtggatcacttgaggtcaggagtttgagaccagtctggccaacatggcaaaaccacatctctactaaaaatacaaaaaaaaaaaaaaaaattgccaggcatggtggtgcacacctgtaatcccagctacttgggaggctgaggcaggagaatcacttgaacccaggaggcagaggttgcagtgagccaagatcatgccactgcactccagcctgggtgacagtgtgagactccatctcaaagaaaaaagaaaaaaagaaagaaagaaataaaaatataaataaataaataaataaatgttaaatgtgggaaacactgagttaaaccaaactagatggattcttcctatggaacttctcacagacttcaccagcaagcataagcaaatcaatttccaaggggtggggggtacattttgtaacattctccaaatgtactggtctgcagaatccctttgtccaaaagcatctcaagacatcatgaggatgccaggaaactaactgcctgtgggatacgtgggcccaaggcagtgcttctcaaactttaatgtacacacacaatacctgggacccttgttaaaatgcagattccaatgccgtaggtctggctggggctagagagtctgcatttctagcaagagatgctggtgttgcatcaccctcagcatggcagggacctgcaggacagctctggctagctctggccccgccacctccccaggcaagccttctcccagctcagcacccccaggagaacagcccttacgcaaacttccagggcggtctggcctctgcttacctcctcaaccctggaactattccacagagtgcaagtttcatcgcaggcccctagggaatccagacccttctagagatctatccctgggtccctaccccaacccttctctctgtcttccacgagccacacccctccctgcccttgcctcagaaagccctcattctgaaggtcaggtccacttagcggtcagcctcgctccccagccgcccaaggtggctgggatcagtggtgaggaagggagaggaggtgaaaggaggataagcagagagcaaggaggccccgtgaggtcttgtgaccgactgggcctcctggtgccgccgaggtggcagtgccaaagcgcagtgctggaatacttggcctgtctccggagcaaacacccaatccaaacaggccctagtgtgtctccgaacagactgtgtaaataacggggggaggaaaaaaaaaccccaactggccacagatcccgctttcaaacacattgaaacaaaataatccctctctccctcactcgctcactccccactgcttgctcttttttttttttttttttttaaatttccaccggtgccgaggcctcagtggagcctggctggcggcttgttagagcctgcagcctacctgtcctgcataggaatgaagccgggaggagttacatgatatgccctcgttgcaggccggggacacagctaccgcattcagagaccaggaaacagagcaaaagctgttctcagagtgcggctgagcgaggagctacaggggaatggagggggccaagctgcatggaagattgtcccattaacctggctttttaccagggtggtcctctccctaacccctaagaatcacaccctgcatccaaacggcagcaaccccagaaaacgggctaagaactcccccgaacagagctagatctagaaagcccagcacagggagctgagcctgagcagcctctctccaagggtggctctgaactccacatgtgtgtacagacaagggggcgactggcatgtggtttgtttctggtcttgtagtcggtttggaattttctaagtcagggtggggtggggggactgtgcacgagtcatgtgcagactggaacccatctccccctcggtctgcaagttaaaacaattgggttgtccttctcagcatctgccaatgtctcttactcaatcttggatcaaaagggcgttggaggaggaggctgggagggaaatccagacagttctccgcctctgacatcaggtccagctgttagcatcgtgctgtgggtccctgaacaagaagcaaagtcaggactggtttggccaggtaggtgaggatccagtgttgggtgattctgatccatgcagcccttagaggcgacacagacgtgaactggacattctaggaagaaagagccgactgccgggtgacctgtctagttcacatccactcaccatttccctcctcgttcctattcttagaaataagactctgacgctctcttttatacaggctagtcccctataggcatgtcatggtgattatttgcaatcctcctgactttcctaagaagagatcagacttagcagggttagtcctcatagcccgaggctggacaggaagagaactccatatcctatgtccaagaatatcatcaaatccttatgaagcaccagttgttgtgacgcaattttaaaagactggttcaaagtgcctgtctgagactaagcagatctgtgggtcgagccaatgccacacccattgtggtctttaagcttcttttccaaattaaaaaacaaaacaaaacaaaaaaaaacacctcttacacattaatctccatttaacatagagtgtccatggggtatacagttatggacttggcactgtatccagcagagagcccagagaaatcaaacaatatgatcttggcttttaaggatttatacctttgctggaaaagacccaatttacccaccaaagttcaatgcctttcatttcttcagatcgtacatgtctgtaactaaaagctcccccttccttgagcagtcattacgtaccaggcactatactaagggctttctaggcagaggctctcacttctacaaccaccttgtacagtgcaaaccactactatcccattgcacagatgggcacatggaggcctaggggacaagcaacatgaccaggtcctacagctgccaagtgacagcgtgcagaccttgattcagggtgcatgtcattcccttgtgtctcttgcagcacttaccaccttctttctacccggcaatcaagctcgtattcaccttctatctctatcagagctcctaaagtgctctgagtgccttccttagcaccgtataaccttgagacaacgtttattgaataaatgacttgtaagagagaaaaagggaaattctacttatccctttgttcaaatatttattgagcacctactatacgtctctcactctgctggacatgggacccaggtggtcaatcagaggtcctggcctcatgggccaagtctggtgaggctgattccagaatcacagaaacaagttgcacccataccaagccctgcaaagcactcacgtgctcccttcagaaccaggcagtggggacatgaccgtgaaagtagtaggctctgccatggagttgggtatcctctgaggggagaacagatccacaagagagggaaaaacatggaattaaaaatctctaatagtctaagggaaaggggggtttctaaagtcctcaagaggtcaaactagctgggcgcagtggctcacacctgtaatcccagcacctggggaggccaaacctggacaacataggaaaaagaaacctctacaaaaaataaaataaaataaaataaaataatgagccaggcatggtggcgcatgtcagtggtcccagctactcacaaggatgagacgggaggatcatttgagcctaggaggtcagggctgcagtgagctatgatcataccactgccctccagcctggggagcaagaccctgacccccctcctccccaccaaaaaaaaaaaaaaaaaaaaaaaaaaacaagaagtcaaactgagctaacttggcacagtacatcctactttatgtgagaattcctctcctgccattttatgtgactcttggtctcagcagtgacagaggtaacacacataaaataaggtaaggacacagtgagataccactacacacccaccagaatgactgcaattttacaaagtgtcagcacctccaccatgaggactggagcaactggaactctcagacattgctggtgggagtgtaagtaggtacagccactttggaaaaggtctggcagtttcttatgaaattaaacatacacctactctatgacccagcaattccactccgagttatttacccaagagacatgaaaacatgcgtccaccagaagttttgttcaagaatgctcacagcaactttattcgaagcagccaaaacctggaagcagggcaggcacccagtgagagaagaaatggacacacagctgtgggacggtcacacagtgggacactgctgtgcagtcaggaggagcctgatacaggcaataacatggaggaatctcaaaaagtttgctgagtgaaagaagagttacacaaaagagcggatcatgtgtgactccatttatatgaagttctcctagaacggcaaaattagactaggcagaaagacatcagaagtgttgctatggagatgtattagtctgttctcacatggctaacaaacacatacctgagactgggtaatttataaagaaaaagaggtttaatggaggcacaattccatgtggctggggaggcctcacagtcatggcagaaggcaaaggaggagaaaggcacgtcttacatggcagcaggcaagaagagagcttgtgcaggggaactcccatttataaaaccatcagatctcatgaggcttattcactaccatgagaacagtatgggggaaactgtccccatgattcaattacctcccacggggttgggagctacacttgaagatgagatttgggtggggacacaaccaaaccatatcattccgccatcacgggagggtctaagggtgagggtggactggcaaagaccatgaagacactttgcagggcactggtattattctgtacctatggtacacttcagattcgttgcagtacagtgcatgcaaattttactttaaaagaaaaaatatctgccatcaaatattaaactcgagtgaatgatctgaacaccgcagtatttggagagaagaatactaatgtctgcaacttacttggaatggatcaaagaacatgggacagaaagaggctggaagagcaggtaagtgataaagcaagtcaactgtggaatacaaaagtcaactgtgggccggacgcggagattcacacctgtaatcccagctcttagggaggccgaggcaggtggatcacctgaggagttcgagaccagcctgaccaacatggggaaacaccatctctactaaatatgcaaaaattagccaggcatggtggcacgtgcctgtaatcccagctactcgggaggctgaggcaggagaatcgcttgaacctgggaggtggagattacagtgagccaagattgcacccaagattgcaccatcgcactccagcctctgggactagagcgagactctgtcaaaaaaaaaaaaaaggctgggtgcggtggctcacacctgtaatcccagcactttgggaggccgaggcgggcagatcacgaggtcaggagatcaagaccatcctggctaacaaggtgaaaccctgtctctaccaaaaatacaaaaaattagccaggtatggtggcaggtgcctgtagtcccagctacttgggaggctgaggcaggagaatggcgtgaacccgggaggtggagcttgagccaagatggtgccactgcactccagcctgggcgacagagcaagactccatttccaaaaaaaaaaaaaaaaaaaagtcaaccgtagaatctacatgatgggtatatgggtgctggtgtcaaattctttccattttctgtatatttgtaaatttccataataaaatattggcgggtggaaggagcaaagaacatcccaaatggcttcgtgtgaaaagaacactgacatgctgagttttcagaggggtttacacaaatccctagtgtacaaatcaaggggagtcgggagagaggaagggaagagaaggcctttgggacactcggggctggatttaaagccacctgatgtagagatgcacttggggtctgagctaaggccaaagtcagagcggcctgcgtctgcattccgttacccacagcaagatgcaatttcctgttccacgagatgaagcacttctcgaatttgaaatacctctcactaaatagcattttgatgagttaagtgtaaatgaatcagaaacaaatggattaagtttctcagcatacacacggaattgacacacacacataaaaataaaagaaacggggaaggaagcaccatggggcgggagggaaagggtctccgcttcaaaccgtgcataaaaccaacgttttaaaaaatacttgattgacttgcagatctccatcctggacatggagggcttctgggcccagctctttaatattcaaatgactttgaaaaatatttctcctcctggaaagcagagggaagaggaaatgctttgaagccttgctagttatttaattagttttttcaaaggtaaggcagtatatttttatccaatattaaataaactttttttttaatggtatgttcaaagcctttaggcctctgatgttgggattttttgttctgtcttgttttgtgttcgaaagggtgagtgaggatgatgctttttcttgccaaatgttctgaaattgcaacatgagacccaggaagcctaagcagccactcacctatcaaggaggagggaggctcagatgggctttagcgacctctctcagaggtaagcagtggcccagctgggatcagaatgcaggcggcctggattctgggtccacgtgcagaatgttctactctgggccggaaagcgatgggctttagctctgagttaatgaccccagggctacccttcctacacaagagagcttacagaaacatattttatcagtcaccgtccatcagggatgatggcagtggccatctccccaaggacactcgcgagacttctcaagtactcagtgatccaggagagcaaggacatgtgaggtcaatggacctctatgtgaggatattggctgagaaaacaaaacaaaacaaaacaaaacaaaacaaaacaaaacaaaaactcctatgaaggattttctcttaaccggcctaatgcagacataagctatacaaacacattgcaccaagattatttggggcacagggcatgaaatagtgagatgggaataagaagggcataaaaatgattcttaaatactccatgtttcagtaacagctcctaacagcccataattcagtgcattaacaaataaatagaattcacactctcctctatcacaaaagtggtaacgactggcataaaagttttcagaaaagatgtgttcggagtgagatacattcaacaccagaatctgctggagacagagttctccaggctcttcccctaagtgacggaagcattcattgttagttgcactaaattgcttcatttaattcttgcaatggccttatgagatcagcgtcattaaacacattgtacagatatttttttaatgggccacaaacaaagtaactaaccaaaatcacagctggcaagtgatggattcaaacccaggtctctccaattccaaagtccctgctctaatcatagcctctcttccatgcctggctgtacccagaagggcagacttcaacccagaaacaactgtgaattgtgatggagagatgggctctagtatctgaacaacgaaattatacttataggctactttcttttcacagaacaaatgagctttcttggcttttaacaaaattatcattgaaaactacaaaattaagatcacccataatcccagcattcagagggttaatcttttgtttaaaatccttccaaaagtcttaaatgtgtttatatgccttttggaaaaaaaatttattttataatcattttggatttacagaaaattgacaaagatagtacaaagagttccttcactcagctttgcctaatgtgaacattttacataaccacaggacatctgtcaaaactaagcaattaacattggtacattacttttaactaaactacagattttattcagagtactcctgtttttccaccaatgtctttttctgttccaggatatcacattgtaaggcactcatatggttttaaaacaaattgattgtacacaacaatatatcatggacagatttcttaatcaacaaatataagtctatagcatcacgcaccactctctcgtctttttttctttttttccttttttttttttgtgtgtgtgtgtgtgtgagatggagtttcgctcttgttgcccaggctggagtgcaacagcgtgatctcggctcaccgcaaccttcatctcctgggttcaagcgattctcctgcctcagcctcccgagtagctgggactacaggcgtgcaccaccatgcctggctaattttgtatttttagtagagatggggtttctccatgttgatcaggctggtcttgaactcccgacctcaggtgatccgcccacctcggcctcccaaagtgctgggattacaggcatgagccaccgtgcccagcctatagcaccactttcaatagctccctaatattccactctatggatggggatactctgctcctgaagggcgtttccacagtttgcatttttcactgtctcataaacacaggatgggcaaacttatcaatggtgtcctcagaagaaatttctagaaatgcactgatagcatgtcaagaatatgccattcaaggcttttcattcatttggctattctcctccagaaagcctgaacccatttgccttaccaccaataaatgagtagctttaacttaaattcattttggacaataaatgacttccctggtaaactaacttgtccactaccctcgaaagaaaaagctatgggactggaaagagttaaaggactttcgagacagtcatgttccccaaaaccagactgatgatttcgaacaaccacccagaaattaaagttccattctcgtcaactcaagtttgtctcactctcctctctgggtctgacagcgaaagagatgttcgggcttttggcatttcaatcatggaattactttcggggtacaggggcaacccccaccgagtttaatttccttctcatctctctgtagtgtctattgaaactccctaaaggaaaagctttgagcaggctcctgtggtaacgcatgtaacaggaaggacaaaggatttgatagtcagcaaagttataagcctggtttttttttaatggtgaaaggaatagggggaaggagagagattataaaactgcttgcatatctagaaatagttcaaattgagcttgaaccaggaacctgcccagcatgctaactgcggccatggttccttgtccaaaggaagcccatattttattttgagactcctgttctttggtgcaaaacactttgtccccatgcttagaaacactataaaacgctatatatttaggataactgggaaaaaaaggcggcttggaaggttccgagaaattgagccctaccccatgctggggaattcttcagcgccattctggcttgcaaaaagaaaaagaaaaaaaaaaaagaaaaaagaaagaaagaaaaaaaaaacaagctactggtcagagggaatgctcttccatgccaagctcagcttgaattaatacacaacacaacctcttaaagaggggcactgctttaaactaagagtctcttctgaaaatgtaactgatttgaaaaagcaacaggaagttgagaatattctggaaggaaaaaggctgcaacctgatacattttcttcaccccagtgtttgcaatcttgtcactctggtcaaggccacaccttcaagtcaggagggatgaagcctttgaagcaaaggatgccagtttcacttccccaagcaaaacaatgcccaggacccatcctgagcttgctgcctccctagggcctctgtggtctggttgagtggctggtagaacccatttcactttgaattctgcccagaaaccacaggaggatcagtccacggaagagaaaaatctaattggttacagggacttagcatctgcccagaagacattcatgccctttgtcctacatggtttcccagccaccagggaggagaggacttcagtccagggaccacatatagaacctgattactttcagctacaagatgaatttgttctggggatctaaagcacagcatggtgacaatagttaataatacaacatggctcgcttgaaatttgctaaaagagtagatcttaagtgtccttacccccaaccccacacacacggtaattatgtggggtggtgaatgcactaattaatttgattgtgattaatttgattgtaaaacttatttcacaatgtatatcaaatcatcatgttgcataccatgaatacataaatacaatttttattagtcagctgcacctcaataaagctgcagagacaaaaaaacaaaagagacgctttctcttgttagctgatggagtattgcgttaagtacaggaggagcaagttactgcaaagagaaacgaaagccttgaaaaccaaagcactgttatttccgcgtgtatcttccagggtgaagcaagcacatttctgtgaatgggagcttttttagacctatttggagatctgtaaaatttaggtgattcaacctaccaaccttaaattgaaacccaagccattacaagatcagactgtagcgttctgaaggagtgtgtaagtgtacgtatgtgggctttgtcatgaagcagaatttgagaaaagggaccacactgatgtgaggctttaccaaagccccgcgctataagcaatactccaacagtgttgtgtgtgtttgttttcttttaattgggaatagttatgcatactctgtaagcacaaactgtaaaagagggaggttatacgaatagacttccctactgtaaataaaacacactgttgggatcaagtaaaacttgcaacaaattaagcctgacatttaggaataaccatggtgtaattgagctacatagaaatccaacataaaagacaaacttcctaaggaggtgactcaagccacacctctgggggcagatagtgggaggtgagaggggacagggaaagtagcgaagtccctggaagtccttcaggaggctgaatcagagaggcttcagccagggctcaaaggcaggcagtgtggatccagaatgccactccttgctgtgtcggaggattaaacagagtcatgtgatgcctattctcaggcccagaggtggcttgggagcacctgctggaaggacaaggtcgagatcctcaaatgtccccttctcttggtctccaggtcattgaacttagaggagtcactgagggacagccacactcctcctcctttaaaaaccacaagctgccttgctaccttcacatcacctgtaatgccctccaattatatatttatttcattttaaagaaaatatcagccaggcacagtggctcacgcctgtaatcccagcactttgggaggccagggcaggcagatcacttgagttcaggagttcaagaccagcctggccaacatggcgaatccctgtctctactaaaactacaaaaattaaccgtgcatggtggcatgcgcctgtaatcccagctacctgaaaggctgaggccagagaattgcttgaacctgggaggtggaagttgcagtgaacccagatcaagccactgcactccagcctgggcgatacagcgagactccgtccccctgaccaaaaaaagaaaaagaaaatatctgtaagaaagctggagtgctttcaatttctcacaacttgattgggttggttctctgtctactttcctagctgggactaatcactgaagcacccagggttatttacatgaacaccagcttctagaaaactctgcccctcctcccttaggaggctctcaggttcccctgctgcatagacctggggcagccaccacatttcccataccctagagaagaaagaacaaagggccatttgcaacacgggacacttcaggagggaaatccaggggtggcctcaaccactaaagtaacatgagagctcgatgctccctaaagagcccagcagaggggggcaaggagagtcacggaagtgggtgggtaccccgtccaaaggctggttcacagtttgccctggcccctccatcctcccaccagaagacaagaggattgctttcactcctgggtcattcctgccagccctccctactgtgcctacctggaggtgggcagtgagagggacagggtgggaaagccttggccccaagagactctgggcagggccctggatggaccacccaagccatcctgctgcagcaaacagatggtgtgggccgcctggggaccgtgaagtgcactgctcagctcttattcccgagagggatgtctgtgttcacagggccttattctacacacacccagcctagcagcagctggagtctactaggtggcaaaaaagttagccataagagtttggggtcattcattcattcacatcttcaacatttttttttttttgagacaggatctcactctgtctcccaggctggaaggcagtggcacaatctcggctcactgcagctgtgacctcctgggctcaagcaatcctcccacctcagcctcattttttttttctttttttttgagatggagtctcactcttgttgcccaggctggagtgcagtggtgcaatctcggctcactgcaagctctgcctcccgggttcacgccattctcctgcctcagcctccctagtagctgggactacaggcgcccgccaccacgtctggctaattttttgtatttttagtagagacagggtttcaccatgttagccaggatggtctcgatctcctgacctcatgatctgcccgcctcagcctcccaaagtgctgggattacaggcgtgagccactgcactcagccccacctcagcctcttgagtagctgggattacaggtatgcaccaccatgcttggccaattttttttttttttttttttttttttagcaatggggtctccctatatctcccaggctggtctcgaactcctgggctcaagtgatcctcccacctcaggctcccaaagtgcagagattacaggcatgagccactatgcctggccacattcaacaattaaagagtctaatttgccaagtattggagataaaatatgcaacaaaaacatccagctccccagtccagtggaaggagacctgatatggtttggctgtgtccccacccaaatctcatcttgaattgtagctcccatagtccctacatgtcatgggagggacctggtgggaggtaattgaatcatgggggcaggtttttcctatgctattcccatgacagtaaataagtctcacgagatctgatggttttataaagggcagttcccctgcacacactctcttgcctgccaccatgtaagaggcgcctttgcttctccttttccttccgccatgattgtgaggcctccccagccatgtggaattgtgagtccatgaaacctctttatcttgataaattacccagtctcgggtatttcttcatagcactatgataatagactaacacaggaccaacattaatcaagcacacacagcaatgagctgtgactgcagatagaggtagcttcctccaggcttaggaatcccattgtgcaagcaagctaacaaaggattggcctaaaaaggtagcgacacaacctgagggagaaataatccatctgctcttgactttgggtagttacttaatccttctacgcctcgctttctcatctgtaaaatgggccaatatatatgtgacagtgggtaggcttaaatgtggcaaggtctttaaggactttagcaaagtgaaaactctcaatcatgttaaattgtgttagtagaagggccccttggaatgaaggcatcgagcttaagcccacagagctggcccctgggcttcctgtagcaatgctccaatgcccacacccatctcttcccctgcagacaggcccggcctatccctgaatctcagtagattctgatagattccctcatctttgccattctctcatttagcctgattccagcgagagcctctaacctcccctgttatttcagccctgggtctctttaagcagccactgccaagctgtgggggattcatggtgattcagccctggccccaagcaagctggatgtgctatcgctcagccaggatatggctgggagcccacaggctgctgcgaagagacaaagctgtcctctccagccttcgaaatctcccttccttctactgacaggcacattgcgggtccagccatcatgcccaaggtggtcagaggctggcttcagcctcttaaagattgaaggcaagacaatcatccacctccaccccaggaggaaaatgaggcagctgagcagtttcctcctgctctcttactctcatgtaaggcatcgtatctgaatgtagacagagtatttgcttgttttctctttcttaggaggcaggaccagggagagacccagcaaagagaaggtcccaagcctagctcaaatctcctggtcctggaacattcaggagccgccccacttcaatggtaattggcctatttccatctggtttccaagcaacatgacacaaaatccccaggaaccttatcacagagccagtgaactggaaggggctggagatcgctctggcccaaactccctgcgccaaagcatgcggggcgactcagacacaaaagggaggaaggcacagtctctgcccagagcccacggtggcaccaagaaactccttttaccactgaagaagaaaaggaggtccagtcttttggaggcaagacaaggtcacctacagagggcctcagccgagcaactcgctagaggttgttttctgcatgaccaccttccctgcaccgtggatccctggggtgggtggtttaggggctttccaggtaagagccagggtcagcgccaggaaatgatgacaagtctgtctgaaccctttccgcagacatacaattgacctcctccagccaagcgctgctccagttagaatctttctaaaactacataggcaaatgtctagcaattgtcattcaactctcacaatgaaagggtaaaaactcattttaatgtgtctcccttgtaccactttcttagtatgcctgaatccatttcatctcaaggaccatacatcaagcactgccttctcaggtactcaactctgcatgcctagatgaagccacagcactccaaatctgattatggggatattttaggaagacagccttgcattaaaaactgaaatcctagccaggcacagtggctcatgcctgtaaacccagcactttgggaggccgagatgggaggatcacttgaggccaagaggtcaagaccaccgtgggcaatacagtgagacctccgtctctacaaaaaataaaaaatggaaaaactagctaggcatggtagtacatgcctgtggtctcagctactcgggaggttgaggcaggaggatagcttaagcctgggtgatcaaggctgcagtgagctctgatggcaccaccgtactccagtctagatgacagagcaaggccctgtctcaaaagaaaaaaaaaaaagaaaaaagaaatggagtccactgaacactaaaaaaaggatgaattttactgtatgtaaattattcctcaataaaactgactttaggaagaaaatccacaggctcacccttcctaaagaaaaaaatacacatataatatcagggaggaaaaaaaagaaggaaattcacacctttttgcttgacagaagtacggtgcttgctttttcaattaaaactaaaaggctactcctttaggaaacaaaagtgggttcagctccaacagccaagcaaagcaacggactcaccccactggggatcccacagctggaaggtccctgacctacttccgcccagatcgcctgaaaggcccacggggcaccagccaagagtgggaagcagagccgggcagcgggtgcagggtggtgagcagagcactccccctctcgccccacaggacacacacaggctgagggcaaatgattcccagacagggacctggtgaacaaagaggttacgcaactcactaatcactcaagacagccaaaaacagaacctgacatcacgtgcctgtgaccatccccacggactgcctgtgaactcccgtagaaggtattcaacagtttgtggaattacactgagcttgagtcgggctgcaaataaaaataaagtcacttttcccctaatcctgtaagaaactgggcactcagggacacgttaactctttcatgctctctagagcccatttgagtctcaatggattcaaggtttggtgggatggaaacatgagtatagtaagaatcatcttagactataagaaattccaaaaatggcggggcaaaaaaaaaaaaaaggaaaaaaagaaaagaaatggggaaattttgttacggtcttgcatataaccaaggttttctccttgtcacggaccaaaccatgatctgagtttggagccttctagaatcctgaaaactagcaaatccatctagtgacaagatgcactaaagccctgtgtggtttctaaaagttgctaaaaactctagaatggcaaacgttgatagggtggtaggaggatggggtactgcactgattatctttttaacctagatttcattaacaatcaccaattaccgtatacatcctaaacaccaggcactacacaaagtaacttaaagttatcagtgcattcaatcatcatagtcctaaaagatgggcacggccacttctatttgataggtgggagcactgaggatacctagctaggtgatggcagagctgagactcaaacccccagctaaccccaaaacacacacccctaattttgtcatccggctctctgattaaaagtgagaggcttttctacccagtgtgctgagcccaagtgcccaaagatgaactgtttccatgagttgtcagatttctgacccagagatggcaggacagaagcatctgactggatcagggaggtggcagaggcccagggaagagggagggcctggcggtttcagtgaaagtcaaaatgacctccccaaatatgcagcagaaattctccaggtaccaggccactgctggagagatcagaggctcaaggctgccaagaacaaggaactactgccagaaataagttaagacctccccacaggtctccagcggtcacccaccgttccttagatcagtctccaccctctaagtagaagacaaaagtggatctccagaaccttgaagctattatgctctgtgaaagaagccagacacgaaaggccacatattgtgaggttctgtttatgtagaatattcagaataggcaaatccatagagccagaaagtagactaatgtttggcaggggctggagggaagggagaatggagaaatgaccgcctaatgagcgcaggctttccttttggggtggtgtatgcatacgtccagactcttcaaaatgtgtgtattaaacaatgtacaatttatgcataccaattttcattcaataaagatttttaaaggacttggaaaaaagttctgaatacaaatagtggtgatggttgcacaacactgtaaatgctttcatgtcactgaaccgtatactttaagttggttaaaacggtaaatgatgttatattgttatatgtattttaccacagtttttttaaggtggaatctccaaagaatcctagaactcattcagtccaagcctaaaaccgaaacacggagtcggggcttagcctctaagggctgtgagggttagaactggatgttcccctaagaccctcaaattcataaactcattgtttagagagagggtggtgccggcaagcagggaaggaagaaggcctgcgagacggtgaggccggacagagcactggctccttctgaggcgaccagggggagcgaggtgcagccagggaggcagggcccccgcccatgcatcctcccccagacccctcgcctcttcccacctggcagacctcatgcttccttccttggggctgggagcccagtgcccttggtctgcatcacagagtcaacaacaatttatctgaactgagcaaacaaggcagccataagaggcggaactctgacaatatttaatgactccgggggtggggaagctttgcaggagaaggagggcaggcgaggaaaggaaccagagaggaggcagaaaactccaggggaaattccgtcggggggaagataaaagggggctgtaaagcaattttgacaggttaacagacaggtaatattccaacggtgtttacttaaccaggctagcactccatgcagcgccgattaagctgcagcacgagagcctcagcagctaagggtttcacagaaacaaagatctagtcagagaaaaccaaataacagccagtcagatgctggcagcccggcctgcagctcccccagctcggaagccacacggagatgcttcctggagaccgatctggaaagataacttgcagcgggtaccttgctgggcctccacctgggatcacagggcctagcatctgacagctcctcggaaagggtggggcatgggcaccaagcgcaaagtgtcccctcttccctcccacgttgaggcagaccagttctccaatcctcagtcctaggaagacagccttgctggtcccacccgctggcccggggactgctggctcaggatctttagccagcaatgaaattcatgccagctcccaaacccctatccacccacccagatgcaaacccaacgtgttctgccatctcttagctctcatacactgggcaagttccttagtctctcggggcctcaacttcctcatctgtaaaatggggcagtaaatttcacaagcttctttaattcatacatcactattaattatctgttaatgtcattgatataagtataaataatgcagatagtccccaacatacaattttcctactttatgatggcgtgagagcaaaacaaattcagccgaaaccacacttcaagtacccatacaacaattctgtttttcactttgaagatactaaaaaaaattcaataaatcatataacatattcaagattttattataggccgggaggtggttcatacctgtaatcccagcactttgggaggccgaggcaggcagatcgcctgaggtcaggagttcgagacaagcctgaccaaaatggtgaaaccctgtctctgctaaaaataaaaaaataaaaaaataaaaaaaattagctgggcatagtggcgcatgcctgtagtcccagctactcaggaagctgaggcaggagactcacttgaacccagaagacggaggttgcagtgagctgagatcgtgccattgcactccaacctggatgacaagagagaaaccccgcctcaaaaaaaaaaataaaagattttattataaaacaggctttgtgttacatgatttgcccaactgtaggctaaagtaagtgttctactaatgtttaaggtacattaggctaagctatagtgtttggtaagagcagtgtcttaactgcatttttgacttacaatattttcatcttatgatgggtatcaagacgtgatcccattgttagtagagaagcatctgtatttaataaataattataaggaataaatgagggtttagcacagtgtctggatgttagtatctactcaataaactttagcttccttatgcaactatctttaacacccacgtggccagattcagaatgtgatcttctgaatatagcagaacaacctattgacaggaagatgcttgatttttaaaatacgtgaaggctattatatctccacccatgctctcatagaatgaggaggaaacgctgttgggaccagaagaagtgtcacgctggcttaggtcccaggagaagcacccgagacacccccagctctctgagaccttggaggcctcactaagcaacttgatatggttccatgttcctgtatttctcagaggacataaaagtgttcaaagccccggaaccagcaagcaagaggtgccaagatattgacttcatttcctatagggttccctggcctctgttacaggacactattttgaggttggattatatatttttaggttatttggaaaatcattgtggctttaaataataaaattctgagtgacatctgtcagccctgattactgtgagtcggctaagctgcattttctttcgttttcatttttaaaagtgcaatgaagtaagtgttacccagaaaggtctgtgagagtctgcagggttgtgtattaaacactctcttgaaactggtcccaaaggcttgtaccagggacctagcaacaggcctggggtggtacacccaagagctgagctggcaaacactgccaaaagcaagaagtgggactgaggcccctgcaaggaatcacaggggcatctggtcaacctccttcatttcaccagtggggtagcagaggcccaagggggttggagaattgccttggatgtacagacagccatggtgaaagacgacaagaggcaggtctccccacagcttcattcaggactctctgagctacactatgaggcccatcaggtcttcttattctatgagtagcacatcaataaggtttgtatcctactgacccagtccagaaatcacctcacgaaagggttcctctacataaatctctgcccttcttctttactttcaggattcaatcattgttcctactcagaaaagtgcatctttttttttctttttaagagatggggtctaggcaggcacggtagctcgcacctgtaatcccagaactttgggaggccaaggcaggtggatcacctgaggtcaggagtttgagaccagcctggccaacatggtgaaatgccatctctactaaaaatacaaaattagccgggcatggtggtgcacgcctgtaatcccagctacttgggaggctgaggcagcagaatcacttgaacccaggaggtggaagttgcagtgagccaagactgtgccactgcactccagcctgggcagcaagagcaaggctctgtctcaaaaaaaaagaaaaagaaaaaaaaaaaaagagatggcgtgtcactatgttgcccaggctagtcttgaactcttggcttcaagcgatcctcccaccttggcctcccaaagtgctgggattataggcatgagccaccacactcagccttgaaaagtacatcttttatgaccacctgttggttatccaccatgtgagtctcacctaatacaggactggtggtttaggaaatacctgtggctgtcgcagttttggtcctgcagggaaagtgccatctacaaaatgaacttggaatgtctaggttcaggcagtctcttcctcagaaagcaggaacctccagaccagatctaccaaaagccattctccctcccacaatcaccgccaccatgtcctgagtatcaatagcttattgaccctcttcatccaggagcaatgaagttgttaagaatcaaactcaatggttttttttttcttttccttttttttttttgtgggtatgattttacagaatcctcctttttcccccaaataagtttgatcagcatgcatttcatgtctgaattaggaccttaattcaaggcccagcacagggaaaggagtcaataagcaactgatgaatagagggatgaatttgggaggcaagccttttcaaagaagctattcgatgggtaaatgcctataaaataagcacatactttgttatgtgggacaagagatggggatgggttgggggtcccattctcacggatggaaacctcattttaaaagttttcaggtttggccgagcgcagtggctcatgcttgtaaccccagcactttgggaggctgaggtgggcagatcactttagttcagcctgggaaacatggcaaaaccctatctctccagaaaaatacaaaaattagccaggccagtagtcccagctactcaggaggctgaggtaggaggatggcttgagcccaggaggcggaggttgcagtgagctgagatcgcgccaccgcactccagcctgggaaacagagtccgaccttgcctcaaaaaaataaaaacaataagctgggcacagtgactcaggcttgtaatcccagcacttttggaggccgagacaggcggatcacctgaggtcaggagttcaagaccagcctgcccaaacatgggaaaaccctgtctctactaaaaacacaaaaaattagcccagcgtggtggtgggcacctgcaatcccagctactcgggaggctgaggcaggagaatcgcttgaacccaggaggtggaggttgcagtgagccgagatcgtgccattgcactccagcctgggtgacaagagcaaaactccatctcaaatagtaataataataataatgttaaagcatttccaggctttgaaccatctttcctgacagagacctctgtgatgtggttgtggaggtgggggcaggttcttcacgttaccaagaagaaaaccaaggaaatgagacaatgagaagctattccaaggtctgcaatgaatgaatagaaaagctgagatgagcactcaatctgtttctcttatttgatattttctattctcttaagatggtgttttaaagccttaaatctcccgaaaaatatatcttacacatcgcactgaaagccttcagatgctaacttcggacacaatgaaatcaccccatgtcccctcagccttgccaaaagctgatgtctaaaccacgtcaccattcgtggccttaaaccctggctaaacaatcataatcacatttctggaaatataggaatggtggctgccaaaagcactgaagtattagaccacacctcaaagctttctgtgcagtgaacactagaaataaggaacttcacaagattacctgcctaaagaatccaccctcacaattccccatctaaaatacaaactacacctggaagtccccagacaagacaacaagtccctggtcaggaatataggaggtgcccaatacatgggaaatacagaagacttagggtctatgatatacacgcattaaaaactctatgctctgcatgtggtccatccatacagtggaatattattcagccttaaaaagatggaaattcctggccaggcgcgatggttcacacctgtaatcccagcactttgggaggctgaggcaggtggatcacgaggtcaggagatcaacaccatcctggctaagacggtgaaaccctgtctctactaaaaaaaaaaaaaaaaattagccgggcgtggtggcaggtgcctgtagtcccagctcctcgggaggctgaggcaggagaatggcatgaacccgggaggcagagcttgcagtgagccgagattgcaccgctgcactccagcctgggcgacagagcgagactccatctcaaaaaaaaaaaaaaaaaaaaaaaaaaaaggatggatattctgatatatgctacaatgtggatgaaccttgaggatgttaaactaagtgaaataagccagtcacaaaggacaaatactatataatatctttcatatgaggcacatagaacagtcagagttgcagagatgaaaagcagaatgatggtttccaggggctggggagaaaagagaatgggaaatgattgtttcatggggatagagtttcagttttgcaagataaaaaagttttgtggatggatggtgatgatggttgtgcaacagtataaatgtgctttgtgccactgaactgtacacttaaacctggttaacatgggggccaggcatggtggttcacacctgtcatcccagcacttgaggaggcctaggcaggagaattgtctgagcccaggaattcaagactagcctgggcaacatggtgagaccccctctatttaaaaaaaaaaaaaaaaaaagccaggcgcggtggctcatgcctataatcccagcacttcgggaggctgaggcaggtggatcacgaggtcaggagatggagaccatcctggccaacatggtgaaaccctgtctctactaaaaatacaaaaattacccaggcgtggtggtgcacgcctgtagtcccaagtacttgggaggctgaggcaggagaattacttgaacccgggaggcagaggttgcagccaaaatcacgccactgcactccagcctgggcgatagagcgagactccctctcagacaaaaaaaaaaaaaaaaaaaaaaggttaaaatggtaaattttatgttatgtatattttaccacaattaagagtaaataaatgttttaatccaccttcttcccaatatggtgagaagcagaaagagactccttcaatagataccatttcaaagttatgctgcctctcagtccatagccctaggaacccaaacaaaaagacaaggggtcaacataaagggcattcaggggtccccagcgggcctccccagcatcctgggactctacttcctccaggggaaggtaaataaaatcagctgatcaaccaatcagctcactggaaagcaggaaacagaaggactctctaaaatcagcccagattgctacacaggaattgtccaaagtccaaaaagttgccactctttaaaggaggcagaggagaatacataaaaaccaagaaggaagaaacaataaaggtgaggtagagaaggactccaatgcaaccaaaaagaaggcttctagcctgagacctggctaccaggggcagaacccaggtcggaggcttctctggcattttctttcctgctgggtaggcaggagttctctccagaggaacacatagctttagcccctctttgaaaaatttgctccaagaaaaagaaaacacgtttaaccagagatacaggatagaaagggcggccagctcttaaaacatgggccataaatgtgcttggaggttggttttgcccttaaaggaaataaaatttatggtttgtcagataactagaaagaaaagccctcagagtggaaatctggccagataaaagtctacgaatgaataggaagttttcttaaaatgcagtgcttaaatatttcagtgagaaaaagatcttaggatctaccaagttggtttttgtttttctttttctttttcttttttttttttttgagacagtctcactctgttgcccaggctggagtccagcagcgcaatctcagctcactgcaacctctgcctcctgggttcaagcaattctcctgcctcagcctcccaagcagcttggattacaggcatgtgccaccacgctcagctaatttttgtatttttagtagagacagcgtttcgccatgttggccaggttgatctcgaactcctggcctcaagtgatccacctgcctcagcctcccaaagtgccgggattacaggtgtgaaccaccatgcctgcccagcatttttaactcaaaccaaacctagaaaaacctccacaagcaaatatcccttcttttcttgtcacgtgggcttgtctttgacccttagctgtgggagagtaaaccttccctttacaatattaacaatctccatattgtggttacctaggggagaaggcgggagggaactgctgactgacaggtgacaagatggcagcttccagactgacggcaatgttcaatggtatcctggtttggatggtggttccgtggatgtgtacatacgtaaaaattcattgagctgtccctaagatttgtgtactttataaacattattcttcagcaaaaagcgcacacatacatacatacatacataatttttaaattgccacaggtttatgttgtgcccaactggagccaagttggttgtaaaaaggggccccaatcacagtgagttcattcacctgcactcccacctcctctccgaatccgccacacggttatggaagctggctccaccgacgagccctctggataaaggagaataatggaaactcagtccgaggagcttatttcccgtttggaggggttttgcaaggcagcagattgaaactaatgacaaaagtaactgagattcttgccaatcaagctctccctgaatcgtgctgaaatctgtcactcaagagcttctatgaggttgtctcattcctgcattacagaataacatggaacaaagattctcttgccatggcagcctttcagacaccaaaattagttgttattctcagtcacctctcatccaggctattcattcattcaacacacaagatttatcaaatctgacaactatttctacatagtatggttttcagatcctctcactgtcctggctccatatatgcccttttttataagggcactgttgcattggtgaggacaccaccctcatgacccaattgcctcccagaggccacatctcctaataccatcacattggggattaggttttaaggcatgagttttgggggagacataaacattcagaccatagcattgagcaactgtaaagaactattaaaagtgtgcgcggccaggcgtagtggctcatgcctttaatcccagcactttgggaggccgaggtgggcagatcacctgaggtcaggagttcgagaccagcctgaccaacatggagaaaccccctctccactaaaaatacaaaaaattagccaggcctgatggtgcatgcctgtaatcccagctattcgggaggctgaggcaggagaatcacttgaacccgggaggtggaggttgcagtgagccgagatcacgccactgcactccagcctgggcaacaagagtgaaactcatctcaaaaaaagaaaagaaaaaagaaaaaaaagtgtgagcaaggtaagcagataccccttctccatcctatcaatgtcaccaccatcctcctgccactcaattaggaagtgtcttctcagccttgtccactctcctcctcctcccctctccctgtagtccccactggtcttgttccttcttcctgtaaggaatttaacactttcatttatggagtcatcatccttgggatgggtcgccgccagcccttggggcattgcaagctcgtgtctgatacagattcccagctctggctcgtgactgacagggtcagagtctgggatgaggttcagagttggtgctgtgagtaggcaccgagaggaaacgcgggctagggctggcactgctgttagaggctgccaggtctcactgggcagcttgactcgccattctaacctgtgaggtgctcccatctcctcgtttctcccaccccatgtccacctccctggaaggcaccagccttgttgcataaagggagcacgatgctgcaagcttagtgctccaggacgtgggttcctactaagctctcctcatgccgcactccattttctcatcatctctgactgcccctcaccacctatcatgctattcattcattcattctgtgcctcttcagctcagagacattcatctggtcttctctgccgcctcttccctgcatgccaccctgaaccccagcgaggttttcaaatggtttcctggctgttaccaccccagacaactcatggagaagcagccatctcaattctccgcctgtccccggggtggccactctcctggaggctacaacctggacctttctgtcaaggccagtctccttcttgtcacctcatgttgtccctggccccatggttcacccgcatcatccctcctccttggagacctgatacagcccacaccagccacccatcagctggtgatgccctccttgtatgcccatagcatcccccggggccattctcgactcacactgcatgctgtctctcccagcactacctagaggcttctactctgcccccatgacaaccatcatcccaataatagctgatacacactgagtgcacagaagtaccagacactgtcccaaacatcaattaattcttaactcatttaattctctgcagtgtatgtgctcattatttttagtctgcccattttacagatgaggaaactgaggcacagagaggttcagtaacttgcctaaaggtacatggctaaatgtctagatggtcaactccttgaggagtacggtgtatgtgtgtatgggtgtgggtgtatgtgtcttctgacttttccaggtatcttctataatatttcattcattcaatcggcattcattcaacttcttttttagtatttattcttgtttgaaggatggaaaataacaatggatagatgtaggcttgcagtgtaccatcctgggttattacccctggctctgtttcagtctaggtgacgctgatgactttttcactctcctggaagcctattataaatggtgatgacgtggcctacctctcaggttgccctggtatccccatacctgctcaccaagctcactcccaactccaaccccccacccccctacacacacacaggccttccgctagccttataaaccgacaagtatcatccataaggaaactacataaaaagatcaatagtctgtctttgaggcctataccacattaccttgcaacatcaaaatcagggtttatccttaaagttagcacaaggaaaagacacccactggggaaagggaggcccaggggtagccctggagctgggaccaggatatccccaggcctaacgcactgtctcccctgctaaccacaagatggcatggtgcagaaacccagagagcaaaggtgccaggctcttcccggagctgctatttctcctaaagacttggtctccaaaggagatctgcacgcctcatttgttgcacaaaatagaaagagcagccctcatgtttcagtctaaggcattcatttgcggtttttatttatagtcctgcatatatttgtgcacacatagatacaccagccaggaagtgcaggtccaggtacacacttacacacacacacacacacacacactctctctctctctctctctctcggaaaatcaagatttatttgtatgtacatacagcccagttaaagataagtccattcacagtccctaaaagaaaaaaaactattaagcttcacattttcaattccaaaaccactctaaaaataaaccgctcatcaactcaatcgactttcaaagtcacacaaattagtgtggatagtaaaaattctaatagcttactccttttgctcttaattaacctaagaatttggaaaatggagggaaaacaagagaacatccagcctcaaaaatttgttcccgaagcagcctttctctaaaagtatgacagtatctctcttggtctctgctctgttatttaggaatcgcctgcaatccatgcaacccactaagtgaaaattcaaccacttggtagttcgtgcatcttgttcagataacctcgcaggagaggggatgagggacagacaaaatattcctaatgatatgatggatttattgctgtagacccagaggcatcagaatatgccaagagatgcaccagattagatggtcctttgtacttcaaaatatcacctccccgctagcccaaagaaaatccacagaaaacaaacaccattgatattcaagtaactgtctctccacatatttgtttctttcttcattttgatgatcttccagtacatcacctcctggcctctcccttcttcctatctctgtccttacaaaagaaacgccaagtcctctccttccgcccacataccaactttatgaaaaaatccctggctggagctatctggggcacataatctaagaacaaagcctgcaataatgttgcaggttgcagcccatgctttatccaaagggtgggaacatttctgttgagcacacagaggccaaccgggagaaaaagaaaatgccatctggctggcaagggtttatgtctgtacccacagcttaacagaggggaagccagcaaagggagtaccctttgtaatttcttgagggatatttgagtttagaacaagagggcagtaaaacaagagtctgcaatgctatcatttcatggtggaagaggttgcagcattcccaggaattttgagcatgaataaaggacacttccaagaaatttccaggctgggaagaaatgtccaggccaaagctctagagctctcgggagtataagctcacttctgtgtcagaactgtccccagcccgggcgtggtggctcaagcctgtaattctagcactttgggaggccgaagcaggcagatcacgaggtcaggagttcaagaccagcctggccaacgtagtgaaaccacatctctactgaaaatacaaaaatgagccaggtgtggtggtgcatgcctgtagtcccagctactcgggaggctgaggcaggagaatggcttgaattcggtaggcggaggttgcagtgagccaagatcgcgccactgcactccagcctgggcaacagagcaagactccgtctcaaaaacaaaaacaaacacaaaccatcctcagagggtgtttcatgttaaaatttgaagagcatttcaaggaagacaatgacgtaggcatcttggttagaaatctcaccctcagcctcccctttaaaaatcacccaccctggcctcctccatccctcaataccattcccaataaagcaaccgctatagactcccagatatgtagccaaattccttctgaggggtcattagcctaaacgcagcatacataaaaacacagcaggcatgaaaagtaatttaaaaaaaacaaatgcccttctaacaccaaacacactggttatcctaataattccatgtctccgaaactcaaattccagccatcaattcaatccacactaaatgacaatcactctcaaaacatatcatatcagttcaaagtaacaattatatatgtccacaataatatccaaagtgccaccaaaaccatgttaatgtcaagttttcctttaactattgtcatcatagagtttctccttttatcatgaagaaatacggaattaaagatatgaaatgaaaaaaaggaacattctggccggggagaagagggaagtgacgttattggtaatcagaaagatagtaagcgctaacatttttttgagcgctacttcctgacactgagcaatgcattttacatgcactatctcatatctccttcccccacagcctctgagggatgtacaatgaggcccatcttacagatgaggaaactgaggttcttaacagtgaaataatcccagtgtcagcatggaaggtgaaataaataagacagaagagattaagagagaccgattgcaacagcctaagaaataaatcatctgatcgaagctaaggaagttgcagatgacaggactgaacagaatttaaatgcagaggatgagagaaagcggagagttaagacgattgtgtgttgttgtggtttttttttttaactttgaggggtttattttttgagatggagtctcactttgtcacccaggctggagttcagtggtgcgatcttggctcactgcaaactctgcctcccgggttcaagcaattctcctgcctcagcctcccgagaagctgggacaacaggtatgtaccaacatgcccagctaatttttgtatttttaatagaggcgaggtttccccgtgttgaccggctggtctctaactcctgacctcaagtaatccacccacctcggcctcccaaagtgctgggattacaggggtgagccaccgcgcccagccgagacaattatgtttggactgctgtatagaaattggtaacagaaacataggtttgaataacacgggcagtaatttagtttcagaactgctgaactcgaggaaccatgggcccgcaggcagggacagctactaggcattaaatggtacccacaagcctttcccaaactcgtgtaccactacagagttcatcacgtatcaaaacaaatccatctgtaacagtcaagttttaacccttttgggatgttttcctaccaaccagcctgaaagcaaatcaaaagtatagttttgcctcttcgagaccagcctggccaacatggtgaaaccccgtctctactaaaaatacaaaaattagccaggcatggtggcgtgcacctgtaatcccagctactcgggaggctgaggtaggagaatagcttgaacctgggaggcggaggttgcagtgcgctgagatcatgccactgcactccagcctgggacagagcgagactccatctcaaaaaaatttaaaaaaaaggtatacttttgcctctgagatagattgtgacaaaggcaagccctaacatcaccccataactctacggccttctcatccaatgtcctgggacacagtgcttagcttccaatgccaggatttctccaatcccattcatatcccggcctttagcaagcagaaaagccaaacagaagaggcccaaaacagtccttcctcctcgggagtggcctgaaggaggcattggacgagtctcacctgacaagaccaaggcagctttctcctccctttggcctgaagagaagtggctgaaaaattatctgcacaggaagaaaacagggcggtctgaatgccaattcttgaacaattccacttaaagaatcaaagtcctccacaaacacccactgtacaatatgctactggattctgcaggaaagctttctgtgggaccatcctggggctactcaatgcccaccaaatccacagccggtagcccagcagaaaagaggtctcttaaaatctcccattttgggccaggcacagtggcccacgcctgtagtgccagcactttgggaggccaaggtgggcagatcacgaggtcaggagatcgagattgttctggccaacatggtgaaaccccgtctccactaaaaatacaaaaattagctggctgtggtggctagcgcctgtaatcccagctactccagaggctgaggcaggagaatcacttgaacccaggaggcggaggttgcagtgagccaagattgcgccactgcactccagcctggtgacagagcgagactctgtctcaaataaataaataaataaataaatgccccattttgaagggcaataaaactccatgtggaatgccccaacaagacacaaattcagttatatcccaggtcagcgcacgtcctcaccatgagcaaatggtggacagtatatgcctaagaccagcggctcccctggccactcctgacaagcaccacacagggctccccagctacagctgcagcttccctactagaaaggagaaaataaactgtttagacccagatacctaactctttggccccttccacatccatctcctgcaaaagtttatcatatcacaaacaggcagagacagccatgcaaaccaaatagtccacatgagcacctatgcttcctggccctcttagatgacagggccgtacacccagcacattgtggacaatgggctgtgagcagttctcccgtctctccctgctgcaataaccctgaatcataggttcagatggaggtggtataaaatggagccactgtcatcctaatttcctgaagcacagcctccctcctccacaacccatattatgcatataacacgaatgaggaagcaacctttgttttaagccagtgacatttggggatgtttgttactgcagcatagtttaaactatcctgactaatatactcactatctaagacccttgagagaaatttcttttttcattccttctctcattaaaataaggctgacatcttttagcactctattcaagattcttcttaatttgtccttgacataaaaaagccactgttccagcagacacccaacttccaagattcctatacagatcctttcatgcctctgtgcctctgcatatgctgttccctctccctgggatacccttccccactctcccaccctgcaatgctctttgaacccctcatccttcaatgtccattgaatgtctctcacaaagcctccctaccagcctcagacggactgagccacacatccctcagggtatccctaacagtcaacttctcttcagccatggatcacgtactattataattacttgttgacaagtctgtctgctcactgtatgggaactgtcggtgagggcatttgtctacctgtatctttttatccccagcacagagcacagtgccaggttaatagtacatgctccacaaatatttgttgaataaatgaacaaatgaataaatttctcccatgaagatctacagataagaggtcttaaataaaaacatcatatacatatatcaaaatttatttcaggtacagatgtttacaagtagaagacacacatctcaaccacagggcagctggaggggacaaatgttcagcccataatttacttaagcaaatgtatccactgtcctttttgcccacgcaagcaaacaactatgttgcttctcactctattttcagaaagtgagtttctaaaaatctcaggaaaaggtgggggtgcaggcctaactatgttcacctaaggcttaggcctaaacccaagcaggttcatcttggtcttttgtccatcaatccaaggaaagattcctcagctgcttcccaatcaggagaaaaagctgctgtctgcgtgatataataacaaccccaggccaagccgacagggtgggagaagaagggctaaagtgtgttcagaccaaggacagtgagctccccttgtttgctccatccagagatgaatgaacaggaacttgcacgtggctgtcatcctgtagtcagggggtggtcacctggatgcccttctgcttggaaatcctactggggacacagaaacctcagaggggtctgtccacagcacaaccttgtccagctgattcttcaacaactgccagacaatagaggtcaaatctcagaagaaagctacgatctcctccagcctctctgtctagagagctcttcaaaccccccagggcatccccaggcagcctcagggagcagggcaggtgggctgtctctgccactccaatggggcatcttcagctgggtcaggctcacaaaagggcagacagcaagtcagtcatttggtttcattgagacatgcctgcgtgctatcctacccttcccctgagtggtggctttttatgcctccagagcttggtgtcacgtggagccaggcgggaagtgcactcactagctggggaggcaggcagacctggtcaggtcgccagctttgctaccaataacctgcgtgacttcagccatgtagcttaacctctctgaacatgtttcttcattcataagatataaatgatacctcccttccagaattgtggaaggtgctgaacacatgtgcagaatactctctgggcatagtaggcggtcaatacatggaaactagtgtttacattgtatgttctcacaatacactccgaaggcagggtcttccatggttccctatgaagggctgttctcagcgcaggcttgtcacaaacaggatgatcaggaatactttgccctatctgcaggcaggatgtacatatgatgacacacttccaagcatgcagggaggtctcagcacagactcctgcctgtgacggtggggctcacgcagcctgtcgctcagtctcacctgagacagtaattgccccgatacatcaatacatgccaaggtcctcccaggaccgtcttcatcaagcttccccgcttgatgaaatacgtcatatcaatatccctacggagttatttttagagctcaatgaagggccggtatctcctgtcctggcaataaatacacaagccagccaccagcataataagacttagggtaacaccaccacttactgaggacagatcttctgtggggacattgggggaggacggggtctgtgagatttccgggtaacctcaccttggatggaacatgggtcatctccatctgcctggggtcacttctggctttcacaggctatgactggcacccatctcgactggcggtctactccttaacaacttctgtgtgtgtgtgtgtgtgtgtgtgtgtgtgaagtcttccaaaattgtgctgtcacgctttgtgcagcctagaagatgtctcagtgagcaaatcctaaggacagcagccctgcaatgaagtcagccagacttaaagaggaaatagatggctgacagctgacagctgtccatcacaaagtccatccctacagacatcaggcccagtagaaagtaaatgctgtcaccatagcaaaatcaggtcccaggtttgctgcgtgacagccttcccgttgccgccacccggcagcaatccttcatcaccatcttcaccctcttcaacatggaaagggccggaggagccctgctgctccccggctgatggatgagactttcattgaaactcactctcacccaagtgtcacctcagccattgccctgctaagcctcgccccccgagtgtccagtgaaaggctcttttcttctttaaaggaatctggggaactgaagcggcatccagacagaagcacttaggtggggggcctaagaagtcaccccagatcttcccacctgcctcggcagctgtctcctccttttctctccactccacccccagccccgccttcctggggggtactgtcttctgtatcacccccatcggatgccctgagtcacatcttctagctcctgtgttctctccacctccagcagtgaggattctacacacatgtgcacacatacatgcacacacaagcacccgcaaaacatacatccttcaaaggaatgttctttttttctttttttttttttttttttttttttagcagagcctccctttgtaccccaggctggagtgcagtagtgtgatctcagctcactgcaagctccgcctcccgggttcaagcaattctcctgccttcgcctcccaagtagctgggattacaggcacctgccaccacacccagctaacttttgtatttttatagagatggggttttgtcacattggccaggctggtcttgaacttctgacctcaggtgatccgcccaccttgccctctcaaagtgctgggattacaggcgtgagccaccgcacctggccaatgttctttatgagtagagacaagacgtggtagacaccttttttctcatgtctcatgaccacgattatgaagattcattcttgaatactccttgaatatcctttgttcaaaactccaaggttgtttcttgtgcagtttctgagatgggaaatccatcccatgacttcaacaggaggagatccatgaagctctaaattggagatgctgaggcaagcgaggggggaactgccatttgataggatgcccctggggcaggggagggtgatggaaagggtgatgggggcctggagagacagccagttagcaaaatggttaagagttaagctctggggttcaaattcttgctctaacgcttgacatcggggtgactttgggcaaagtaccgtgacttccctgggtctcagttcctcaccacaaaaatatagcaacacctgtgctgttggggtcttgggtggattaactggaatgatctggacagagcccttggcacagtatttggctcataagcagcatttaataactttctagcttctaagaaattaccacccaatatacaaaaatcaacacaaaatggatccaaaatttaagcttaagaaaaaaaagaaattaccctccattatctcaactagactttacatcaaccctatgacttggtaggtatttgccccattttacagataagaaaactgaggcacagagtgtcctgtgcatcccccaagatcacaaagccaggtaagggcagagccaaggtttgagccctggcagctgtggctgcagagcgatgggcccaccgctctgttctggggcctacccccggcacagcagacctgaacgtccaggcctttccagggctagcacagagcctgcatagctgcagtgactacagtagctgtttcctttgtcctcgtcccctgcagtttctttccagagtcccaagaagccacacaacccttcaggaggagattagcagcagcagaaaacagaaataagagaaagttagttttctttttctgggctagaggtgccctgctgcgctggagagaaactgggaggagggaaagctaatgccagccccagcccggtttctgcccgctgccctttgcagctctaggtggaagcacaagcttgctaggctcggcacgctcagagctgcaggaaggcggtcagctctggcagccacactgctcctgtcccaaagggaggacagacctagagaagcggcctgatctgccttctccacctccgaatccccccaccacacccacacacacacacacacacacacacgccttttgcatttatcccggggtcctccagagggacaaggaaggggctgattcagtgacccctgagccccgcctctcagtccccagacttcaggcagcctgggaagcctccgacctacattcagatgcctaggggttctgggaggggcgctcaaagctcagaggcctgaattcagcaccctgctcaggctctttgagaaccgctgacttgaagtgggcctgctcgctttgctaaacaaatatgggtaactctggtcttccaaaaagagctcacaattctgtcctccctggaagctacaattcaatcatcctcttccaaacgtccaaatcccagcttcagtgaggctatctcacacagcaacctgcctgggagtgacctgcatgcaaaacttcaagagtttgagggaaacttgagggaaacttgcagaaaccagcttgccaaggaaaaacgctcccagtgcgttcaatgaaaaagcaggcgacccagctaaatgagtaaactgacccaatcggggggatgaaagggaacgtatatctatgcaatgacaataaatcgtggaaagacatattaaaatacaaaagccatttctagacgcaaaatcatggatgtgttttatttgcttctttgtgttttctggtatttttacaaaactgcactgcagaatgtttggaatcagatgaaaagttcatttctgagaagcctccttcttttctcttttaaattttcttcttttgcattccattttggccagctcgcttgaactctgcgttcaaacgcctttctctcccaagcaaaagctccaggaggaatcttctggagcaaagttagaaccgcagggaagcttgaaaagaggaaacagaccagcctggccggtggaggttaaattaaactacagttctctagcaggcctcgggcttggtcaggagctattggtaagacggcagaaacggagtacaggccaataaacaaatcaaaacaaaaacaagaagcaaagaaagaaagaaacatgttttaagaagaataaagtcattaggtggcaaggggcctctgcaggaccatccaggccagggagaaaaacaccaccaaggacccaaacttctttcactggggagctgcaagcaggaggcgctggctctgagcagtggctttgtgcttcgggcagaaccggccgcgagggctgcgccccaccagccgcgcgccgggagggcggacgcgccgggcacagccaggcgccgggggtgaccgcggcagcaccggcccggcggctggaagcagacgcgccgctccgcccgcgcccgcgcccggtggagccacagcgccatcaagtggccactcggcgaacggccgcacggggaagcggctcaggcccagggaagaggtccagggttcccagccgcaactgtccctggggaagggtctggacctgccaagctgccactccagggcctgaggcaggagcctgcagacggacaccagctgtccaggcgcactccaccacccagggctgccccagaggatgttcgggaatcctgtctcctccttcgggagagaggttacttttgcagtcccaggcccattctcttctccagcaacttgctcacagtttaaaaggtttggttctcagagagtggcgccagagcaaagggggcatctcgctgctctggggcatcctgcaggggatggcgcagatctggggtccatgtctgtgagcggacaccattggaacatgtgtctagagaatctgggcgggatcactgcccacagcccttcaaggcccacaaacctacaacacatctctcctggaaacagcacgtgatcccatatgccccctggtctttgggtacaaattatggggtgactcaagaagagagcacgtgatatggtttggctgtttgttccctccaaatctcatactgaaatgtgatctccggtgttggaggtgggcctagtgggaggtgttcggatcatgggggtggattcctcatgaatggtttggtgctatcttcacagtaacgagtgagttctcactagaacagttcatgtgagcttggcatggtggctcacacctgtaatcccagtactttgggaggccacgtcaggtggatccctggaggtcagaagttcgaaaccagcctggccaacatggtgaaaccccatctctattaaaaatacaaaaaaattagttgggcgcggtggcacgcacctgtagtcccagctactcgagaggcttgaggcaggagaactggttgaacttgggagatagaggttgcagtgagccaagactgtgccgctgcactctagcctgggtgacagagcaagactccatctcaaaaaaaaaaaaaaaaaaagaaagaaagaaaagagttcatgtgagatgtgattgtttaaaagggcctggtaccttcccccatctcttgctttccctcttgccatgtaacatgctggttcccgtttaccttctgccatgattggaagcttcctggggcctcaccggaagccaagcagatgccagggccatgcttcctgtacagcctgctgaaccctgagccaaataaacctcttttcattacaaactacctaggctcagatagtcctttatagcaatgcaaatggactaacacaccccatgatctccatccacaaaccactggaggaacccaacacagcaacggaaaagttctcagagcaccaatcaggaatatgcatattaatatgaacactataacaggaaattacaggaaaagcatagagcgtttgctctgtgcaaagcactgtgcgaattccttctgtactttatcttctttaacctttaccacgaccttaggacatgagttttttatgatgtttgtttgtttgtttgtttgttttttacagaaaaggaaatggaagcacccagaggtccaaaaactcactcaaggttgcctggcctggagtcagagcctgagagccagctccttcacttacactccttgatcccatctttccatccatcccccaacccccagccgtaggtggatccaggttttgtgagacctgaaacatacatgttttctagagggagaggcagcctctttaagatatgaagttgtaaatacacagttgaggccagtcagggagggctgtgtaggggaggggctctgcctcatctccacagtagatccacccctgctctttagacagccccctgcccaggagctggctttctggaaacactcctccgcattgcccctcacagccatttctctggcttctgcaattgacttccacgcccaccctgcccctgaaactgctctgactcaaggtcactcaatgacagcccaactgccaggtacaatgagagctctcagtgcttccctccaagaggaatttgcagccctgacatttgcactcctggaagcctcttgtctcccagcatccaggacaccacgatcccctggcttccctcctaccgtccagccccactttgtctgtgttcctcatcagtggatcttctgtggactgctcctaaaacccgcaggtgagcacagaacaggaaagagcgtagcctctcagccagccagacccgaggtttggtcccagaatcccagttaacagccgtgtaaccatcagcaaacgggtcaccctctcagagcccatttttctcttccgtgtaattggggttgtacatcagaagttatttagaagattaaatgagatcctgtgcttagtatgtttaataggatgcctgccccaaagcagggatcccggatcactgctgagggtccctgtcagacttgagctccaatccatcaatctgtcctgcgcaccagattaatatttcattgtctgcagaatcagatcacccaggatccctctgaggaatgcatcttgtctgagagtgcccttcccaccaccatcaagcctgccttcctcccttttttgccagtttctgaacgacaccactggcaattcagattcagcatccagacatccaggattcattctgaatccagcctcccctgcaggaaacatggccctggaatccatcatcccccaagactctccctcagaccccaccctcctctcccacgtcggtccgggagttcctgatctcactcttgggtccctgaacagcctcctaaatgctgggtgtctctcctggccccgcctccccactgcccccaacccatcctcctctccaaaagagtgagctcctcagacacatctcagatcatgcagtttctccatttaaaaccttgtgatgtcttcccctttccatgggtatgaagttcaaaccatgccacaaagcttggggtcatcagacccctgctgcccatgtacccacctcatctcccctataaccccctgcaggatttgctcagacatcccaaactacctgcattccccaaaacatggcactagacaccctctcccttccatgtcccctgtacacatgatgttccaccacctggaacactcacccgtttctctgctaaccactttcaatggccaggataaatgtcacctcctcttggaagccctccaggatgtccccttatggttcaggatcaattctctgtgcatcctgtgagtactccagtcacagcactatttgaaccctacgatattagtatttattttcctgtctcccaggctaagtggtgcgctctttgagagcgcagatatcttgaaaagcagtaacgtgcagtggtcgaaagagtgggttctgctctttagtttaattagatcccatttgtcaattttggcttttgttgccattgcttttggtgttttagacatgaagtccttgcacatgcctatgtcctgaatggtaatgcctaggttttcttctagggtttttatggttttaggttgaacgtttaagtctttaatccatcttgaattgatttttgtataaggtgtaaggaagggatccagtttcagctttctacatatggctagccagttttcccagcaccatttattaaatagggaatcctttccccattgcttgtttttctcaggtttgtcaaagatcagatagttgtagataagtggcgttatttccgagggctctgttctgttccattgatctatatctctgttttggtaccagtaccatgctgttttggttactgtagccttgtagtatagtttgaagtcaggtagtgtgatgcctccagctttgttcttttgccttaggattgacttggcgatgcaggctcttttttggttccatatgaactttaaggtagttttgtccaattctgtgaagaaagtcattggtagcttgatggggatggcattgaacctgtaaattaccttgggcagaatggccattttcatgatattgattcttcctacccatgagcatggaatgtttttccatttgtttgtatcctcttttatttccttgagcagtggtttgtagttctccttgaagaggtccttcacatcccttgtaagttggattcctaggtattttattctctttgaagcaattgtgaatgggagttaactcatgatttggctctgtgtttgtctgttgttggtgtataagaatgcttgtgatttttgtacattgattttgtatcccgagactttgctgaacaaatgggatctaattaaactaaagagcttctgcacagcaaaagaaactaccatcagagtgaacaggcaacctacaaaatgggagaaaattttcgcaacctactcatctgacaaagggctaatatccagaatctatgatgaactcaaacaaatttacaagaaaaaaacaaacaaccccatcaaaaagtgggcgaaggacatgaacagacacttctcaaaagaagacatttatgcagccaaaaaatacatgaaaaactgttcaccatcactggccatcagagaaatgcaaatcaaaactacaatgagataccatctcacaccagttagaatggcgatcattaaaaagtcaggaaacaacaggtgctggagaggatgtggagaaataggaacacttttacactgttggtgggactgtaaacgagttcaaccactgtggaagtcagtgtggcgattcctcagggatctagaactagaaataccatttgacccagccatcccattactgggtatatacccaaaggactataaatcatgctgctataaagacacatgcacacgtatgtttattgcagcattattcacaatagcaaagacttggagccaacccaaatgtccaacaatgatagactggattaagaaaatgtggcatatatacaccatggaatactatgcagccataaaaaatgatgagttcatgtcctttgtagggacatggatgaaattggaaatcatcattctcagtaaactatcgcaagaacaaaaaaccaaacaccgcatgttctcactcataggtgggaattgaacaatgagaacacatggacacaggaaggggaacatcacactctggggactgttgtgggttggggggaggggggagggatagcattgggagatatacctaatgctagatgacgagttggtgggtgcagcgcaccagcatggcacatgtatacatatgtaactaacctgcacattgtgcacatgtaccctaaaacttaaagtataataataataaataaaaaattaaaaaaaaaaaactgggttctggaaccagacaccctgggcacaaatcccggccctatttatcctttaccagctgtgggtgaagttacatcacttccgggtgtctccactttcttatctgtaccatgggataatgatggcatctcccttggcgggtggggaggacaaatgactaagtacactgcctgacatgagccagcgctgaccaagagaggcttaatgtgagccccaaaagtagttttcagtgttctcacagccacataaaaaagctaaaaagaaacagctgaaagtaatttgaatcatagagtcgatttaacccaatatattccactgttcatcatttcaacaagcaaccaatatttttaaaattattcatgagctattctgtgttattttttcatactaagtctttgaaacccactatgcattttatgcttgtatcgcatctcgattcacaccagccacttctgaaataaatgctctcaggccacgtgtggcttgtggctgccgtactgagcagtgtgtgaggtgtgactctgctgggaagagactctcaggacgtgcacctggtctgctccggactctgccccgtgcacatttcccatttgctgagtttgcttttttctttctttttttttgtttttgagatggagtcttgctgtcttgctctgtcgcccaggctggagtgcagtggcgcgatctcggctcattgaaacctctgactcccgggttcaagtgattctcctgcctcagccttccgagtagctgggactacaggcatgtgccaccatacccagctaatttttgtatttttagtagaggcggggtttcaccatgttggccaggatggtctcgatctcttgaccgcacgatctgcccgccttggcctcccaaagtgctgggattacaggcataagccactgcacccggccttttttttttttttttttgtcttgagacagggtctcgctctgtcacctagactggagtgcattggtgtaatctcagctcactgcaacttctgcctcccaggttcaagtgatcctcccacctcagcctccctagtagctgggaccacaagtgtgcaccatcatgcctaatttttgtatttttagtagagatggggtttcaccatgttggccaggttgatctcgaactcctgacctcaagtgatcctcccgccttggcctcccaaagtgctgggattacaggtgtgagccaccgcacccagccgagaaataaatttctgttatgtataaaccacccagggactttgttgtcacagcccaaatagcccaagagagaaatcttccccgagatcctccctgaggatgccaaggctgtgaatattctttctcggtattttggaatttgtcaatgtctaaacttgctggaactatatcatggcctaggatgcattcacagaactacatttgatgcttgtggacacacatttttctttttgggctcctgccttcataaaagtatttttaaattatattttatgactgcgttggtataaagacaatataatgataatccgggctggatacattattatatattctttattattatatttattttttcttccaattttaaaggaaattaaaacattttcataggcccctaagtgttgtgggcttggacactgtaccctgcccaggtaagatcactcgtgggtaagaacatgaggttctcacccgtaaggcaggatttttatagaaggaaggtaggtctttcaacctatgtcctccttctgttccacaaagtggaaagccacaagccctacaaaagccttgcaagtcccagaggctgcagccgtatttattcttcaggccaagactctcaggacagagagcacccatgcaccccgcaggctgcaggccatctccctgcatttgggactgtcctgaggatggcggcttcatttttgtccctcctacctctgagtactccccattccttatgtgaagctgagccttaacccgcacccactgtattagtccgttttcaggcagctgataaagacacacccaagactgggcaatttacaaaagaaagaggtttaatggactcacagttccacgtggctggggaggcctcacaatcatggtggaaggctaaaggcacgtctcacagggtggcagataagacaatgcgagccaagcgaaaggggtttccccttataaaactatcagatcttgtgagacttattcactaccataagaacaatatgggggaaccacccccatgattcaattatctccaactgggtccctcccacaatgcgggggaattatgggagctacaatttgagatgagatttgggtggggacacagccaaaccatatcacccttcgaatgtaataatccatgaaaatatctgcctccccctccagcagaagctgagcctgagacagaggattccctttcgattcatctctctacctcccaaggcccagcacatcactctagaagggaattaaatatttaccacatattcattatgacaaccgtccattctaagtaactttacacatgaggatccaatgagccaacgtagaggattttagcaccacagcctcagaagagagcgcttttatttagtccccccccaagaaataggtgttattttttccatttcatggatgacttacataatttgcccagggtcactcaggaagtacatcttgctcaagccacattttttatatggcaaatactaattactcctatttaaaaacaaacaggccaggcacaatggctcacacttgtaatcccaacactttgggaggctgaggctggatgatcactcaagcctggaaggtcgaggctgcagtgaggtatgattacaccactgcactccagcctgggaggcaaagcaagaccctgtctcaaaaaaaaaataaaataataaaaataaatttaaagccatcaaaaggtgaaccttcaatgtccagtctggctacaaagcattccagaaacgcaggcaccaagagccatctattcaattggctctggcctcaaggagtgaggtggtccacagtatgacctataagggcctacagacaagggttcaggtcatggctaagggtggaatcctggagccaggggcctgggtttgaatcccagtgccactactcattggtgctgtggccttgagagctgattcaacttctctctacctcagtttcttcatctgtaaaatggggctaatattgcccacttttaacattgttgcaagaattcaatgagtcaatacaaatgtaactggcagccttctaagatgaccccactggtcaccacctcctggcattcatgccttgtatactcctctcccctggagtgtgggctcgacctagaaattaacatgtaacacagagagtaggacaaatgtgatgagctaccactttcaagactggcttataaaaggctgtgatttccatcttgctggcccctcttttctttctttctttctttctttctttctttctctctctctctctctgactttgatggtgtctactgccacaaggtgacctgccctatagagaggccatataccaggaactagggccccaatccaatagactgcaaggaactaaacctagccaacagccattgagtgagcctggaagtggatcctgccccactagagccttcagatgactgcagccccggccaccaccttcactgcagccttaggagagaccccaggccagcaaccccaactaagccacatctagatccctgctccacagaaactgtgagctaataaatgttgttgtgagttggtaagttcaggagtaatttgttacacagcattagataacacatacaacaagtaaagcactaagaatagcacctggcacacagcaggcattgaaatagctgctgaatgagtaaataaaaaggaaaacagaacattaaattctaaagtgatggcttactgctttgaatctctttgcaattaaggtggggtataaattaataactctataagtaatgacctctccaccagatctgaacaactcccaacattaggaccagcctgcctggctgcttccaccctagttagattttcagcctctctacgctgctacggtagcctctaactggtctccagccttctcctcactcctcatccccaatcttctcttacataccgtgggtaagtaaatctctcccaaatcctcctgtccatagctttgttggtgcctcctaaaaccagcaacatcaaagccaaaaccataactcagcatggagggctctcccaacaccacccccaatccctgcctagccttaagcagaagctgagcctaagaatctactttgtacaccaaatcttcccccataaactaccatatggctgtgtagattctaagtctcactcttccccttggcctagcagattctcacccacccctgctgaccctgtcactgacactggcccttaagtctctgaaattaggcagggcacccccaggctgcatctcaaactccccccctagctactagggctgtggtcctgttctctgcattctggctcctttgctcagaacatcccaagcatctctatttttatgggtaccctaaccaggaccccctctaaatttctctccacctcctccaattagcttcaagccttgtcccactgagacaaggagggcaattccttactcacgtctgagaggtggctccatgccattttgtccagcaggccctgaggcatttccactgtcggccaagccctgactgatcatccctaaacactctcctaacctcctcagcccagaagtccatgtgtcaccctggataagtggccttatgcgatgctatgacatccatccctaaggtctactcccacagtcccacctgcgcacaaacttttttttttttttttgagatggagtcttgctctatcactcaggctggagtgaaatggtgcaatctccactcactgtaacctctgcctctcgagttccagccattctcctgcttcaacctctggagtagctgggattacaggcacctgccatcacgcccaactaatttttatatttttagtagagacggggtttcaccatgctggtcagactggtctcgaactcctgacctcaggtgatccacctgccttggcctcccaaagtgctgagattacaggcatgagccaccacgcccggccgacttctccttttacatttttttttcctgatgaatttatttattttgctcaagtatggaaaagagagttctcttggccgctaacgccccaattaaaaaataaagcacattgtgattggagagccatactccatataaataataaatgaggccttagatggacacagatagagctgactggcaggcgggacatgttctctgtggcttctttggccctgaggaagcacattttttttgttcgtttgtttgtttgtttgcttttgagacggagtctcgctgtcgcccaggctggagtgcagtggctcgatctcggctcactgcaggctccgccccccgggattcacgccattgtcctgcctcagcctcccgagtagctgggactacaggcgcccgccaccatggaagcacattttttaagaccaaaaaaatagacaaccaactataataaagtgacatggaagactaacttgataaatataatattctgagaggccagaatggggaaaatggcagcagagaaatgtgtcctcatagatttgaactgggtcatctgagaagctttgacgattgctctgaagacttcagattttattctggaagcatgttgaggcatcagaagtgccaagagctgggcgtggtggctcagacgtgtaatcccagcactttgggagaacggtttgaggttaagagtttgagaccagcctgggtgacatagcaagatgcccctgtacccgatcttttattttatttttttatattattatactttaaagttctagggtacatgtgcacaacgtgcaggtttgttacatatgtacacatgtgccatgttggtgtgctgcgcccattaactcgtcatttacattaggtgtatctcctaatgctatccctcccaactccccccaccccacagcaggccccagggtgtgatgttccccaccctgtgtccaagtgttctcattgttcgattcccacctatgagtgagaacatgaggtgtttggttttctgtccttgcaatagtttgctgagaatgatggtttccagcttcatccaggtccctacaaaggacatgaactcatctttttttatggctgcatagtattccatggtgtgtatgtgccacattttcttaatccagtctatcattgatggatatttggattggttccaagtctttgctattgtgaatagtgcctcaataaacgtatgtgtgcatgtgtctttatagcagcatgatttataatcctttgggtatatacccagtaatgggatggctgggtcaaatggtatttctagttctagatccttgaggaatcgccacactgtcttccacaatggttgaactagtttacagtcccaccaacagtgtaaaagtgttcctatttctccacagcctctccagcacctgttgtttcctgactttttaatgatcgccattctaactggtgtgaggtggtatctcattgtagttttgatttgcatttctctgatggccagtgatgatgagcgttttttcatgtgtctgttggctgcataaatgtcttcttttgagaagtgtctgttcatatcctttgcccactttttgatggggatgtttgtttttttcttgtaaatttgtttaacttctttgtagattccggatattagccctttgtcagatgcagcttctccttttaaataaaccaaagagccatgcctcaattccccctcccaccagctgcataaaaactcccaggtgtaaactgttcacttctccttctttcctccttactgagtgaggtgaagtcccttctcagagaattcctgaggtgtcagtaaaccttccaaaggcacatccaagtgtccacagcatcatcaacccagccatcccataaacctctgggcaggttgtcatggaaacccctaggaaaagggaatctcctttccatggctaaagcccccgcttaacccagttctcccctcacctcctgagatccaactccagtaaaaattgtctccttttcacccccagcttacgactcaatcacaagagacaggagcagctttcatatccctgctgagtggaagtgaaaccttagccacagggaaacacggatgggaaggcgggaagggacgaccttggtgtaagtgacccctggtgggggtcacagcaggtgcccaactaaacacttggaaaaaaataagaaaatgtgtttcttataaggagtcaaactcattaaaccagcagataaagacagaaagtcccgcccccagacgcgtggaactgtgagtcttggcaggtcacgctgacgcatgtgaaaaagacacctgtggaggcagtagcctctgtgcacacaactcacaaatgtggatacatgcacgcacacatgtgcacatgtacacactcatacatctagttacacatgtgcacacaccccatgcacagcccacacacacccatccacacactcatccacgtgggcgcacacacactcacacatgtgcagacactccatgcacacatcccacacatgcacctatccacacactcatacacctgggcacacatacgctcacacatgtgcacgcaccccatgcacaccccccacacacccatccacacactcatccacctgggcacacacacactcacacgtgcagacactccatgcacacatcccacacatgcacctatcccacacatgcacctatcccacacatgcacctatccacacactcatccacctgggcacacacactcacacatgtgcacacgccccacacgtgcacccatccacacactcatacctgggcacacacgcacacacacgcgcgcatacaccccatggacacatcccacacatttatccacacagtcatacacctgggcacacatgcacacacatacgcacacatttcatgtacacattcccatacacccatcaacacattcatacacctgggcacacattcacacatgtgcacacatcccacacgtgtacctatccactcatacacctgggcacacacacacacacacgtgcacacaccccatgcacacaccccacacacacccatccactcatatacctggtcacacatgcacacacacacacacccatgcacacatcccacacacacccatccacacatacacctgggcacacatacacacacacatatgcacacatttcatttacacattctatacgtgcacccatccacacgctcatacacctgggcgcacacacacacgtgcacacaccccatgcacataccccacacgtgcacccatctacatgctcaaacacctgggcacacatgcacacacacacctgcacacaccccatgcacataccccacacgtgcacccatccacatgctcaaacacctgggcacacatgcacacacacacaccctcacactcgccccagattccaagagcaaaccagggcagtgtgcagtcagctccatccaggaggaagacgctgacactcagagactagagccacctcctctaatctcgaatcccacgctcagcaggcaacagcccagatcatcaagtgaccccctggatgccttgaaaccaggacgcaggtgcctcagccagaggctcctggcagtacccccttgaagaagggcggctggaaagagacatcaacatctgatgggtgcacccctcctgtgctcctccagagccatctgtcatcagagagcctgggcatctccaattctgatgagtcagcacctccaagaccaattcccagaccctagagaatgacagttaccagagtgaggtctccgacccttctggagctctcccaccccatcctgtcacccctgcctctcagcctgaccgccatgtaaccctgggggtgctgagaagacaggagaaggggaggggaagggataagggtggccctgcacgtctggggtcatcagtcctcacaagacaccacgattacagacaccacagaaatcatttgggctgaaccgtgtgagatccagatggtccagatccaaacccaccatgccctggccatgaccttggagatggtactgagcagttgaagatatcagtggctgtactcaccttacagatcattctgacggctaagtactgataaagacctctgcctgggagaatacacgcatgacctccaccttgtcaaggtgagaatcaatactttacagatgatgaagctgggggcggggcactgattcacccaaaggaacactgagggtggcagcaccaggatttccacgccaggttggaggccaagcccagctgcttctcgcaaaggagacagtgacaagtgctcacaggtatcaccgtggccgaccacagacacagccctgatgcagcctcaccacaaaacctagttctcaccatacccaagacccccagttagcccaaaaccaggcgagcaattcaacatactcattgttacaggctccaaaaacgcagagccaaaagaaatgacaaaggactattcactcaacacctcaaactcaaactaggaaatatctttccaagcatgaaaaaaattgttccaggaccaagacaaggaaaatgcactttcataggtatccatgagcccatactgatataaatgagtgagtgaatgaataaataaataaacgagggagatgggacaaaatgtcctgatagaagaactccaaatagtgtatttggacacttccccctccaggaaattgagcttatgtcccctcctattgatataaaggggctggacttggtgactctcttctaatgaagggtacagaaagggaaaaacagcaaatgcacagtgaagaaaactggcggacaccaccttagaccagtgatcaaggtcaagatcaccagtgatgaacgctgttgacgtcacgtacccactgatttgatgcaatgagaacacttcactgctgtattctccctgaaaccccagtttattatgagaaaacgtcagacaaaaccaaatggaagaacatccttcaaaatacatgactagcattctctaaaattgtcaacgtcactaaaaacaagaaaagactgagggaaacatcacagagcagaaaagactaaatacaatgtggaatccagactggatccttgaacaggaaaaggatattagtggaaaaactaatcaacagagaccaactctatggttaatagcatgcttccaatgttaatttcttagcattgataaacgcactatgatgatgttgacatgcttgttgtatgcatataacatagtatgaagatgttaataccaagagaaactgggtgagagatatatcagaactcctattattattattattattttgagacggagtcttgctctgtcgcccaggctggagtgcagtggcacgatctcggctcactgcaacctctgcctcccgggttcaagcaattctctgcctcagcctcctgagtagccgggattacaggcatccaccaccacgcccagctaatttttgtatttttagtagagacaggggtttcaccatgttggccaggctggtctcgaactcctgacctcgtgatccacccacctcggcctcccaaagtgctgggattacaggcgtgagccaccgcgcccagcccaggaactcattttctgtaaatgtattttctgtaaacttttccgtaaatccaaaagtattccagaaagtggataatgtgtggaaatcttcaataacgcaacctgtgtcatacaatgggatgatgtcacaaagctgtatacagtttacgggcgataggcagctgcgtcctgcccctaatttttagaattagagcagctacccggtgccaggtgctttactgtcgctaattcacaaaacgccatgaacaggagcctccccgtgaatggaaaaccagcaatgagagcgcttcagtcgcttgacagtcacattcatgtgtgcacctgatccggcgctggctccaaagcccatgttctttcccacacgccccactgtgcccctccgagactggaaccgtagagagcgaccacctctttctatcaggccccagtgccctgcaagacacaagaccctccgggaggggtctctgtccatgggtccatggtcccagatgctggagtgagagcttcatttgaaagccgatacacggaataaccacgaggtggcgacagaccccagcaatatccaggagagatgcccgcgggcccagaggagctgcctgagctcaggtgctgctcttcgcctgacttccctgctgggcacagctggttataaggagttaatgcctttgccctggccacgatttttgtgaggacagaagcgagccacttccctcaagcaccgttataactctggaggtctatctgttaggaacaatgcagattgtgccttcgccggcctttggcagaaaccggcagagctctttacataggaccacacccccaggcacgcacacaacacacacacactcacacacccactcacacacacacccacacataccacacacacccagacacacacacaccacacacattctcacacacacacacccctccccagagacacacaacacacactcagacacacgcccaaacacgcacacaacacagacacacataacgcagacacacacaacatatacacactcatacacccagacacacagagacgcacaagactcagacgcgcacacacacactcatacacacacaggcagaaacccagatatacacaatcatacacacacccacacacttatgcacactcacactcatatacacacccaggcacacacactcatacaccaagatacacacccacacactcatacacagacatacagacacacacacaccagatatgcacactcacacatacactcagacacactcacatacactctctcacacacatactcctgggagggatcctgacattcacctaggggagtcaggggctacaggccttgacaagcatgctaacaatttccagtgtgggtaacagacctgggtcctggtctcccaccttttaaacctcagatgctccagcctgtaatccctactacctgggtttgaatcccagctctgttacttaccatttatgtgaccttgggcaggtggcttagctgtggtcctcactttccccacctagggcctagagacaggagcagggctaagcccactggatttttaaatgtatagctgaaagtcacttgaatcagagcctcatcaatgtctggcactttttgctgttgtttctaccccttgagggagtgtatttaccctgcccccagtcctctgtattcaacagaatacaattcttgtatatgaagacaacacgggcttaccatgacaagcctagaagaggtcctaatgaacaggtgccctgctatctactcaggctacgaaagaaaagactagagattcctccaaactacagactcgattcatgggagatgctctccacctctaactggtttccaagaatccaccatagtgggccatcttgttacctagggaggacttgagggcacccagacctcaaaggatccgctaggaaagtcatgtgggcaaagctgcaatgttttctctctccgttcctgagagtttggtttttccaatggtcaaagtgaatgttcaggatctactgccttaaaaaccttctctaggctaaaatgtgacagccctataatgacagaggacttgcacactccagcagagcatgctattcctgtaggccctcaagtgtttatatgagacagactcaagtgttttctggaaacagtcatgttgtagcataggagggtgatggagcctcccaggaaagggtggcacccatgagtccccggattttccctagaaggtgccagcctttacgacctgtacagaagagctgccttccagggggctggcagagcagaactccccacattgtgccagctcatcgtcaccaaaagctccactgccaacacgcacttcatggagggagagagaaaaaccagggttcaatccgttctttctagaccagggctccagaaagcaggggtcctagagcaggagtcccaggagtctagagcaagggtcccctgaccagcagcatctgcatcaacagggagcttacaagaaatgcaggttctcaggccctgcaccagagcaactgaatcaggaacattgcgggtgggaccagccatctgtgtcctaaacagccccccacaggggctcagatgagctccagctgaaaaaccacgggcctagatgctctgaggagtacggttcatcaaacccagcagccactgcactgttctggccttcctcagagtgacctttacagacctgctgtttttcgttttttgtttttctgagacagagtttcactctcgttgcccaggctggagtgcaatgacatgatctctcggctcactgcaacctccacctcccgggtccaagggattctcctccctcagcctcccgagtagctgggattacagagcctgtcgccacgcccagctaattttttgtatttttagtagagacagggtttcaccatgttggccaggctggtctcgaactcctgacctcaggtgatcctcccacctcagcctcccaaagtgctgggattacaggcgtgagccagcgcacccagcccagacctgcacttttgtatttatgtcacaggcctccttagtagaaagtggcggggaaagaacctagaagatccttgaagctcagaatttcctgtgggaagaggatgcgtccaccacagagcattcctggggagcccacgcatctctctgcacagtggcagcccgtggataacttcacctaataagaattgatagagctgacccagaaagtactagcctacaccggaccatagccctgccacccctagcaattatatagggattagagcagaatattttatcccagctttccccgtggcttttatcttatttttccttcctttatttatttttatttttttagatacagggtcttgttctgtcacccaggccggagtgcagtggcgtgatcgcagctcactgtagcttcaaactcccagctcagtctctgaagtagccgggaccatcaagccggctaatttgttttttgaaaagatagggcctcactatgctgcccaggctggtctcaaacttgtgggctcaggggatcctcctacctgggcctcccaacgtgttggaattacagccatgagccaccgcgcccagcctttatttcctttacttatgaaaataacattttaaattaaatgccttaagtccttttggcgatagaccaggtatgttcaatagtctgccaaagacatgtgagttttctaaagctatttccatccatgtcggattggggtgagagaagggagacccagttaggctgctggtaaatgtgtacatggcctgcacctgcaataatataacctgaacactagagggcaccagagcccaagagtcaggcagccccagacttggccctgagcaggaagcaccaggcgcaataaaagccccctccagaccccataactatccaggctgcaagagctgcaagatccagaccctcctcagcctcacacctccaaacacccacctgcccgtgttcacctgtggggtggtcagtaagcaagtgcccagggacacacggagcagggctgcaaccccaggccatcagtcggcctgtgctctgagcccccactgcgtgccaagtgctgcagggagggaaccatgatggtgccgtgcacgtgtgcagagcctatcacttaccaaacatgttcgcccacacacagacacacagacatgcacacgccacctctttatatcatccccagcacccagtaaggccagctccatcaccccatcctgctgatgagaaaaatgagtcccaagagtgcacggtgacttctcagggtcagacatcctggctggttaacagccgcccagctggggaggtcccactcggcccagggtggttttccactttagcgcagcacctcccaaaaagcaaacatgaacctgttctcgggagtcctgcctgcgataacctggagctgggctaaacctggagtgaatgctgttaaccaagctcagggcgggtttccaggaggctgagctcgcacagccacaatggcaaagccaccactcagagagctggagccctttagtttcccggcgcctcctgccggttcttcccgtaaacgtctgtggctcatgctgcacagtattcggttgcatctgctgcttcatggctctgtaaaaggcaaggtggggggctgtgtatatgtacgcatgagtatgcatgcacgtgtgtatgtgcacatatatatgcatttatgcaccccctagaggcactatgggccatgagggacctgcctgtccctccctgcacctcattctggccacagtggccagtcctctacccctgtccccagccgtgtcctgccccagacccaccgggaaaatgcaagggagagacaaggcaccctgcacaaatccacagacgcttacagggtgacaccagaaaggaaacctccaggcaacctacctgtcccggagctcacagggagtgtggccctcccagacacccagcctgactccccagacacagccatcatccaaaaatggcaccacagaggcagccatcaattattttgtttctagtcttgctcaagttttttgcacttattccctttttgtcctaataaataatttccatcaaaaggaatcccgcgaacatggctatttggcagagaacaatcatatgtcaaactttcctacatctacaagaagaatggatctgttgaaacccatttaagtctcaaatgatgtatacagaatatagagaatattctttgccacagatgagaatatccctctcgttctgaaaatctggctgagcagggccggtgctggagcaaggtccgtgctggagcaaggtatgggggagtcctctttcccatgaccacttgcatgggtgtcttcatgagacccactgggcatggtggtggggagagggctcatggggctgagctcctgggggtgagctgtaacccttctttggggactttttatctcagactgaagggctcagtctcggtgaccagggcagattctgccaccctgcagctgttttggaggaaggtcagggaggcccatgaatatggaaccaaccaggaggaggttcttgggacacacagatccaggacaacacagccccaggctgacgtccccatcagaccatccatgaggcacaaaccagcgcccgccatactctgaagggcccatgaaaatgttttaacttcttttaaaatcaggggaaaaaaaaatagaacacatgcttttaggtaaaaaaaatgttttaatatatcataatatttgacatttttaatatattttttaagtaggaagggatccaagagggcaaagttgcccagaacctgcaaaagtcagaatggctagagtggcccgggaagtttccagaactcctgagctgggacagccgaggtacactgacaaccgcaccatagacagccccccaaagccagatgccccttctcgtgggccctgagaggggagttactgcacctgccagagcacagctacatggcccaaggtgcttccagctgcaatgagaccctaagaactctgtccacttaggaaaggttcttatccaaccccggggccaggcaggaatgggcgtggagagctgggtaacagcagaaaaccaggaagatgcaactctccccgttctcctgagacaaaccctagtgcaagactccactgcatttccttccatttctattgactatggtaatatgcacataccacgcaactcggcattttaacctgtttcaagtgtacgatgacagcacattcacagtgtcgtgcaagcatcaccaccatctaggtccagagcactatcagcccctctgaaaggaaactccaccccattcatcagccactgtccactccctgaccccagcccagcccctgccagccactaagctccttcctgtctctgtgggtttgcctatcctggacatttcatagcaatgggatgtgcaacagggggccttttgtgtctggctcctctcagcctcaggttttcaaggtacctccatgttggtagcacatgtccatgctttggtcctttctatggctgaataatgccccccacacacacactgcctgctaccttccattggtttttctccccttaggggcatgaaagtgctaataaaggaaagctgaaacctctatgacttatgttaacaaacctcagctccaagcactcacctaggtaagagatgtgggtgctgagaactgaaaatgagcaggcacacgcttttttattatttatttttgttttgttttttttttgagacggagtctcgctctgtcaccaggctggagtgcagttggcgccatctcggttcactgcaacctctgcctcctgggttcaagcgattcttctgcctcaacctcctgagtagctgggattacagacgctcaccaccatgtccgggtgatttttgtatttttagtagagacgagggtttcatcatattgggccaggctggtctcgaactcctgacctcgtgatccacccgccttggcctcccaaagtgctgggattacaggtgtgagccaccacgccccacctattaatttatttattttgagacagagtctcactccatcacccgggctggagcgcaatagtgtgatctcgacttattgcaacctctgcctcccgggttcaagtgattctcctgcctcagcctcccaagtagctgggattataggcaagcgttcataaatgttcccatacacgtctgtggctcatgctacatggtattcggttgaatctgctgcctcatggctctataaaaggcaaggtggggggtgtgcatatgtgtgcacatgagcatgcatgcacgtctggctattttttcatattttcagtagagacggggtttcaccatgttggccaggctggtctcgaactcctgacctcaagtgatcctcccaccttggcctcccaaagtgctgggattacagaaggcaagcacatttttaaaccacaaaacacaaaaagtcagatccacctgcgagcgtgcattctgtctggcgtcagccctaatagtctccctctcttccatcattcagggccccagggagtcgagtgcttactcagcacttagaccaggggattcagggatttctgcctggaaagccccgtctctcctgtcttggtggtaacctggtcccttttacctgcagctctggcaaacgccagctgctgggtgcttcctcctccttcatgagaaaagatgagaaactggggtaaacaacccaccaagggcaggtatggagagaagaaggaaaggctaagacacagatgggagaagacagacagggagaaggtagggagaagatgacccatttggacctgctcctcaatgcccaagaagcagagagtttttcaaggacagctttaataataagagctcttcttcgaagctcagggggatggatggaggaagagtgtgagacccacagcaagagcagcaagctgacacctccctcgccacagctggaagccgctgcccactgaccaatcccatagacgcccttcactccccagcctccacacccctggctaagaggacccagaatggatagcacagttgttttttttccccctctcccaacctccctggggctcaaggaacgggataagggttatgactgccagatcagagactcaagtcacttcagatgttccttttttttaaaaaaaaaaaaaaaaaaaaaaaaaaaaggccggacgcggtggctcatgcctgtaatcccagcactttgggaggccgaggtgggcggatcacgaggtcaggagatcgagaccatcttgactaacacggtgaaaccccatctctactaaaaatacaaaaaaagaaaaaaattagccgggtgtgatggcgggcacctgtagtcccagctactcgggaggctgaggcaggagaatggcgtgaacccgggaggtggagcttgcagtgagccgagatagtgccactgcactccagcctgggcgaaagagtgagactccatctcaaaaaaaaaaaaaaaacaaaaacaaaaaaaaaaagcaaggcacaaaagtgcaatctgtggtgaaaaactggaactcaaaggccaagagttaaggactggttaaggaaacaatggcccactgactcactggccctcaagcaccattgaagataattatcaatgtaggctgcaacatagaaaattggtcttattataaagtgaaagaaggaagatacgtagaatatccatggaatggttccatcctgccaacgcgatatgaacatctggtccagagcttcaagaagataacaaatgtatttcatctctaggcctctgtcaacttttcaaattttctaccactgttttcacaccaagaccaccataacagccttagcattatgcatttgcaacttgcgtacctccctgatgtttcccgtcccctctctccctttacagaagcaattacttgggccaggcacagtggctcacgcctgtaatcccagcactttgggaggccgagatgggtggatcacttgaggtcaggagttcgagaccagcctggccaacacggtgaaaccccgtgtctactaaaaatacaaaaaattagctgggcatggaggcgggcacctgtaatcccagctacttgggagactgaggcagaagaatcacttgaacccgggaggcggaggttgcagtgagccgagatcatgccactgcactccagcctgagcaacagagtgagactccctctcaaaaacaaaaaaaaaaaaaagaagaagagctcttggaataagagctgggccgtccaccacacgtgtgttcgtgtgcacacgcacacacacaaacactcggcagttccacttaaccattctcaagtcagagcaactggtggctcttgaggccaggccatcagcatggggaggacaatgtggcttttctctttcaagggctgtttgcttaacactgagacctcctgagcctgagcaaggttatgaaagggggacgacttctcagctctcagcgtctggaaggaatcccaatgcacactgctccctggtttctgatgttccttgtgcccagtggtcctcctgggatggaaatgcaggggcagagaagaggaagatggactacagccaagcatcgctggggatggaggatggcgtggaaagagggtgccccagggccactgggcaagcctagagattcgtttctcctttgagtatctcccaaaaattcttcactggaactcgagcctggaagtccactcaagggaacaaatcatccataagcagcagccatgtgccaggcaggtccaagagcagaatggaagagtcttcaaggatttccaggatgtggagtttgagagtggaggaagagaagagatcagaggccaggagttcaccagcacagccccagttccttgcaccaggacagtttcatggccaagccctgctaccctgttagtcagggtacccggccacccttgagactcattggctaaagaattcactcactacaccgctgtccggtatggcttttgtcctgttacaaaaacccccagtttggccgaaagataaaaatggaagggaaaaagaagtttcatggtattacttacataagattaaactaaaagttaacattctcctactcctcaatagcaatcttaagcaaattatatttgctttgcagcatagtgtacaggcattcaaaatcaacacaaagacaaggacacaggcatgaggaaaaacaaaaacaaaaagattaagttaaatggtgggaatcaaactgcatgctctaagatcatgactctgcaaaactcaaatacagaccagggataaaagagattgtcaaatgtgtaaatacatgacaggctctaagatcatgactctgcaaaactcaaatacagaccagagataaaagagatcgtcaaatgtgtaaatgcacaacaggcttttttaaatgcaaagttgtttggaataacaaatatacctccaatagcaatataaaatcgaaagagaaacttctcagaggacctcagtggatggcagcagagaacatcattgcatctccacgttcaagggtctagcctgcttaaccaaagccccgttgtcaaatcaacctacagtgtggaatcagcatctcctgccatcttcctcctgcccctgaccatgggttatgagcaggcactgcccctgcagcctccgacgggtgatctaaacactgcctgccccaagctgagctttccagcttctctggccacaccatggctgtagtcccgcactgcaccccagcaacccttgttcactcttccgcccaagccttagtcctctcttctgaggctcccttcctccctccccacagctgtccctcaaggttccacatctaccttcttgatcatctcatgcaccaccatggtcttccctatctgggagctgtggtccattcattctgttctcgttagtgaatcgctggattgtttatctcacaccttctctcccaactcctggctatgagcccctggatgcctggggctatgtcaatttcactttctcctcctctgcctacatcagaccttcgatatgggtttgctgaatgaataggtggcttctcccttcctgtctccttcgactgaggttgggatggtcaggaggaagcctcaaaattagatgaatgcatatctcatttttcataaccaatagcctacaaaatcagctggggaagagaaaaatcagccacagcatgggaagccttggggaggggagggaacttcccaacacccccctgccaacacaccccagaacccatctagggggttggcgtgggtaggaacaatgagaggggagagtccagtccttcctggccgggaggagggctggaccatgttccaaccttccacttactttaattgccaggaaacaacccttctctgtctgtcattataacttaattaagctacaacagccggaaggaggaggccaggtccttcaaaactggcaggcagggtgaaaagcctggtcaggggcctgggcaggaagggctgaagacccccccaagggcagtccccctcacacacacaggagcctcacctttgtttctggttaacccattcactaccaagaatgcaacagtctggacacacagagaaggctccatgagaagttggtgacggtcactttctcagaagcattatactaagcgaaagaagccagacgcaaaagactacacgtatgattccatttctatggaatctccagaaagggcacatttatagagacagaaagctgatcaggccaggcgcggtggctcacgcctgtaatcccagcactttgggaggccaaggcgggcagatcacctgaggtcagaagttcaagaccagcctgggctaatttttagtagggatggggtttcgccatgttgcccaggctaatcttgaacttctgagtgtcacagagcctggtgcacagcaggtgctcagtcacccttaggtgatggcctccctgaggaggaagagccacgcatgggtgggcaagaggaagaggaagagcattcaggatggagaacaccctaacaaaaagcaaagtgtgcattgcagaaggagcactgaccgcaaaggggcctgaagagaccgcctggcagacagtgtttccatctccctaagaaaacctcccggccgggcacggtggctcacgcctgtaatcctagcattttgggaggccaaagcaggtggatcacctgaggccaggagttcgaaaccagcctggccaacatggcgaaaccccatctctactaaaaatacaaaaaattagctggacatggtggcgggtgcctataatctcatctacttgggaggctgaggcaggagaatcgcttgaacccaggaggcagagtctgcagtgagccaagatcgcgacactgtactccagcctgggcaataagagcaaaactctgtctcaaaaaaaaagaaaaaagaaaaagaaaaaagagaaaagacaacctcccagactccacagctcaagatggcaagcctagcccagggcaacatctactctccttcctccctcctcggctctgagtccccctcggaaacaatgcgggaggccccagctaaggggctcagaccccgaacagttaatagggaagataagggccgtttccttcagggaagaaaaaggtcccactggcatctgtcttagcctaagtgggctgtcttcgtgagcctgatgttgaaaacaaacctccagggtcatcatacatgaaaaatgaggtggggaaaaaaggaaaaggaaaatcgcatcagccggtggtacaatgcccaggaggaggggctggcgggcggccagagtcaatacggccagctggggagggaggccgtggggcctgagccgcccgggagaggggagaagcagcagcgcacagagccccctccccagaccgggaagaacagcccccttagaccaccaccctctgggctgggaaatgaggatggatctgctgacttctccaggctctcctgcaaatgcaacaaaatgcaacttggatggtctagaaactggcaagatggcacacttacaggtagcagggaccacaccactaggctgtggaagggagtccccggctgcagagctgatgcagccaagccaggcagagggtgaccttgagccaagtcatttgactctgtaggcctcccctctgccactgtgaaacaggatcccaacagcgaaccctggcaggtacagaacacctgcgagaccacggaacgtggggcccagagcagccctgcatggtcacaggcaacattgccttgtgtgagagcacagcctggagccaagggcttgggtttggggctgagtggcccatttaatagctgtgtgctctgtgacaggtcatttgccctctctcagtttcctcatctgtaaattagagataataataatgcctacctcttagggtccttgcgaggaataaatgagtgttgtagggccgggcaccgtggttcacacctataatcccagcactttgggaggccgaggcgggctgatcacttgagatcaggagttcaagaccagcctggccaacacggtaaaacatcgtctctactaaaaacacaaaaactagctgggcgtggtggcgggcgcctgtaatcccagctattcgggaggctgaggcatgagaatcacttgaacccaggaggcggaggttgtagtgagcccagattgcgccactgcactccagcctgggtgacagagtgacagagtgagactcaatctcaaaaaaaaaaaaaaaatgagtgtcgtatgtgtgcgtgtgtgtctgtacgtgagccgtgtgttggtgggatagtgcttggaacacagaatgggctattgtgttagcaatactgtgattagcaaatactactataagtgcttagagatgactttcaactgtagcctaggtcataacaacctcaataacacagaaccactttctcagaatatgcatccagcctctctcccatcagaggcagcctgaaggggctaaacaggcccctggtttgtcctgtgtgattctgaccacacaggttcggagttggtcggagctgagcggccacacctggcaaccacattgtccgatgactcctgctggcaggctcacccggcacagggcctcctacaccactcagggcaccgtcctgcatggagaacctcaccaaaggtgggggtgccactcttccctcgggtgccatgcctggcgcagtccttatcagtgtatatcatgtgaccaaggaaaaattcaccaaggactccaggcttcggccaatgagggcagcgtttctgccaaaaagagacaagtggaccgggcacagtggctcacacctgtaatcccagcactttgggaggctgaggcaggtggatcacctgaggtcaggagttcaagaccagcctggccaacatggtgaaaccccgtctctactaaaaatacaaaaaaatcagccgggcatggtggcgggcacctgtaatcccagctactcgggaggctgaggcaggagaatcacttgaacctgggaggtgggggttgcagtgagcggaggttgtgccattgcactccagcctgggtgacaagagcaaaactccgtctcaaaaaaaaaaaaagagagagagagacaagtggcaggcaccgatgggcacactccgcgttccaagaccatcccagcacacacagcacacatacacacacacacctataagcccttctgataaaaaagaagtaaaagtgagtccctgggtttggggacacacatccacaggggacagcaggggccaagtgaaaatgtggggtgttttcagaaggtggtctctgagggtctcaggaaggaagcactccagcaggaaggtgtctgcctcctcatgcagcctccactcacttgcagggtccatggtgaccaggggaagggctcctgggcactgcacctgtgaatgccttcgcccatggatacagtgtgaccaggggagggggtcctgggcaccataccccgtgagtgccttcaccccacatttcatggggcctgactcaaggctcttggggcttccctgccccagggccagatcatccaggcagccttagcaggaagcaaaaccatagcccatcaggagcccccacatcagaacagtcccctccatcatcctccctccccaccccctggacactccagtgtgatcctctctcgggccaccctcaaggaacagggctgataaggaagtggctcctctaaaccttaaacctgccccagaaatgcacagcagctggatcagccaccctggaaacttccatcagcctcggttccttggtcttctcaagcctcttttcggggcccaggttcccagaatagaggcagcaaatctcccagagtcctcctcaaatgcctcccattgccctgacctccctaaacaaaggtgcttttttccccagctcctcggggtcaccacattttcgtcagacctgtgcttgttttctttctactcagccccatcttggctttgcccccccgggcaccactgcacccaggagacaaaccctgtattgttttcatagacctaataaatgacatcgctccccacctcctgccactaactcactagccctcccatccccctaggatcatctaaagtgtcccttgtgctaagcggctccctctgctatgaaagaacaggcgagagagaaacctgtctgtctgaaggggcctcccccctccacatgttatcaggtgaagattccacccggagagaggcagcatcataggtggccaatttaaacagtcccagcctcttcctctggctcaggtctagaattgaagggaacatactaaggtggcgattaacagtgctgatgataaaacagaaggatgttcagtaagtttttcaaaacacatctttcatcaagaaggtttctcctcaccccttgaaaaagtcaacgatgaaagggatagaaaagggggtagccatttatgcctagggttccattattggaacgctaagcatgtaggtgttatttatatcctactgctcaaggtcatcaccaaggcctgatttttgaaattcaaaaaaatggcagcctcaggcataaatgggttaagccaggaaagactgaatttttcccactggtcaagttgatgaggttcttcagatgtgctctgggaggggattgctggcgcacgaggaaggctgatcactcataagaagggcttgctctgccaaagtatttggatgtgggatgcagatgcacccgtgtgcaggagcaacaagaaacgtgtgtcatcctgtccagacggggactggtggattgctctgaccttgcagagctcatgaatctgcaaaccaatttccccagagcctctagcttttgtcgggggtgaaataaaccagaaagagacagcagccgccaacctctgcaccgaccaactgatccaagcccagacctcgccttcagcactgctgctcatgagccaccccttggggctgatgttggggggaagcagtcacctctgggcctcatgacttctgaacccaacctgactctgcctgtcccctgctgccctcgatgaggttgtaaggggcaacacactctccaagttttcactgccaccactgcaagagtcccatcctcctccaggcaagggcaaagagtcagaatgacttataaccaggggggtattgagctgagccacagggaggtgcaaatgaagaaccaggagacaagtccacgtgcctccccaaaccctcataaggacacaggcatgtacagcctacagcatgtggttgtttatttacagagccggagagcacctcagaatactcatccctggtattttgcctatgacataaacaaaggcacagagaaatagagaaacttgctcaacatcatcagtcaggtgcagtggctcatgcctataatcccaagaggccgaggtgggaggatcacttgagcccacaagtttgaggccagcctgggcaacagagagagatcccatctctacaaaaaaattaaaaattagtcaggcatggtggtgcatgcctgtggtcccagctactcgggaggctgacgtgggaggatcacttgagcccagaaggtcgaggctgcagtgagtggagatcgtaccactgcactccagcctgggcaacagagtgagaccctgtctctaaaataaattaattcttattaaataagtaagtaatcattgatctgagaaataagaggctatgactgagactcaaattctctgaccctggatccagtgccctctcatcctcctcctgtagatcaccaatctattgctgacgggactgaacctctatagaatgccataagtgggtcctgaacactcacctgtaggaaatgagggttctcagaatggaaaggtaaggaaatggccagcacacacctgtagaggcagccacctgccaggagtggctgggattggagggattgtggggagaactggcagtgagaaccctccccatccatcccatctgctgtcggccccattgggtggacatcgtctgctctaagtgtccatggggattattctggatcccatgcttggcagggacctcgacagagtcagtcaatccttctcttggtccagtccaggagcccaccctctaactatcggagatggggctgctgctgtttctccaataagtctagtgtcaccaccacccatctcacgctcccatccccattgccctctgctgcctccaccacaccaaggcatcgagacctctggcttctctcatttgctcttccctgtcccccaaaaccttccagcttaaccctcctttgtgccatgtcactggtgcctgtggctgcacgtaactggaatggaacatgccttgtttcccactcagccccctttaagctacatcctgaattccccaaaccactcttcctcgtacctgttctgctgcacccaggtgcctgcacggacagggaagcatcttttctcggtagtgcactgtgcttcagagactgggtcccccttcctcctgcaggttgtccatgtacagagcccagaatcttcccctttctgcaagaggtcaagtttcaccaacatctctcctccaccactctatattgttttaggatgaatctcatcaccccctcggatggtcccggttcacactctataggcagggccttattggaaggacctcaagtcctccaatgggataaggtgggctcagccagactggggaaaggcccatatcctcctgcccatagagggagtccatgcccctgacagcccccgcagctgtgctctgtgaacaagaactctgaactcagccgtaaagctggcctgggaaggcccttctcgcctgccacagcacagactcccaccctcccttctccaggccccttacacttggaactgaagtaggcagagctgggctgcacagaggtgggacccagggggccagtccctctccaatctcctcccccagcacacacacagatcaatccccatggcccaacactcctccagggagaaagaaaatgggagaagggtcaggaattggcagctgggagccgcatcagggttcctctccccagggcaccagcagggaagggtcccccttgaccacagctccagccaggtttctaaatcttgcttgtttgccgaagcagccaggcacctcccttccagcccagagtgaagggctatacaaactctggcctttctctgccatctcctccctggaggtgagcactgagccctccaaagacacacaaccagaagggacacaggccagcgggagcacacaccatccctcaccggagcctgagtgccagagccccagcagcgcccgggggaaaggcaggggtatgaggacaaaaccctaaccagctgctggaaggcaagggcctggcaatgcccttcgtcttgctgtgacctccaccctcagcccagcccaccccctttagccaccctgggccccccgacctggcctccagctttgcggcaggcaggacctttagaatcagacaccccagggctggaacttcaagcatcccacctctgggagacattaggtaagtcactttccctctctgagccttgcattccaggtaagatgagaccatttacctcctcaaagacctcataggattaagtgagatgttgacacacctcactgcactgagtggcaaacattcatcccatccctcctcccaccagtggccaaccacagggcatctctggtttacatgacctacggcaactcgaggccattcacagtaaaggccactccagatagtgatgatgacactcacttgcagaggcaggagggtccccgcacacccccctccaaaggggcacacacacagatgaccaaatgcatcccatgaggcagagccacccaaagtcccttagactaaaaatcgtctaacacacacacacactgttggagcccagtccgcggagtgggtgagtatttccctgtccaaataggtggcagaaaaaaataccagggactgacttctctctggcaaaccaagacaaacttgccatagagcatctcagtggccagcagaggagagaggaggtcatttgggaccatttactcatgcgagagtcactgccccatgctaagatttcccctaaaaataaaatgataagataataactcataatgctctccccaaatcagtaccacacagacccccctcttctgtttgctcagacccccgctctccagcacaaagtctttattggtctccctgcaggggtgaaaataaagggggttttgttcttctcctccccctcccccctcgaagggctgagtgagtttatctgacactgcagcagtctttgtaaactgagtgtcccaggataaacgctcccttaagagtcgcttggcctgggacagagggaccctctccagaggagaatggggagcttgttccaatggtcttttaatatggggggcggggtgtcaccaaggacaggcctccagcacactctcacagaagggtctctgtcctgaggctacagtggagggaattcttaaagacacagatgctgaaaagggggaaggaatttttttttcccctaaggggaggggagggaggttagggcgggaaggagaagggggagtggcgaggactcctcattccccagaacaattccagttacaacaaggcgtctctatgccttaacagcaagtgagtgacaagtgggtcagcagccccgcagagcggaattctcctcccagccggatctcccaccaacgtgtgctttgcagctcccaaatccaggatgggagcccaccagcatgcaggaaagaatctcacttttacctaagtgaagggcctctgccacggcgccctaaaagatggatcctttgaaggcattttgagtccagctgtccccctctggaaaggggcaagcagactgccctaaagcccttaaataaataaaattatctcaaacctcagggagaaaaagggtcaattactcctctaatttatttgggtacaaggtcacaacaaaatagacattcccagctatagctatcacaaatgatgttctctaaagattgctcagcaagactgttttctattttgatttcatttatgttgaattgagttcttctccaagaagtcgagttgtattgcagaaagaactggaagccgtgtgtccactgagaacaacctggcatctctccttacctaccttgctcaaggtcacctgtggaaaacggcaaacaaaacaaaaagacaccctccctgctccaagtaatcaagaaatcatgtagttctgagatacacagagaggaaactgaggccccaatacgcggtgtaatgagcccaaagccatgaggcaaattaggaggccaagactaggtaaaaaccaggactcctggggacagaaaaccacccacaggggatagaagtctgcaattctcaggaccactccaaggaaagaccaataccatcttctgaaagctgcttctgcaatgccatatggttaggctactaagccagaacccattgaccagacaccactgtcaccacagccacatcaaatggcagaccagtgtgggccttcaacccaccgagtcgccgtgtatatacagttgagccttgaacaaggtttgaactgtgtggatctaccgatacgtggtttttcttctgcctctgccacccatgagacggcaagaccaacccctcctcttcctccctccaagcctactcactgtgaagatgacgatggggaagacctttgtgatgatccccttccacttaatgaatagtaaatctatttcctcttctttatgattttcttaatattgttttctctagctcactttattgtaagaggatagtatataatacatatctactgtatcaatatataatacatataacttaccaaatatgtgttaatcgactatgttattggtaagactactagtcaacgggaggctattagcagttaagttttagggaagtccaaagttacatgtggattttcagctgcacggaggaccagcatccctaacccttgcaatgttcaagggtccgctgtattaagtctttactagagtcagcatgaggccaggtgctatgaaatcagagtgcacacctatgactatacggaagaaaaaagatccatgtatgtggaaccatcatggcagtatatgatattatagctgtcagtattatggaagtttaaagaaaagaaaaattggatgaaaaacaaaagtttgcaaaaacagacttagcactcaacccactgatgagtttattcaggcataacttgggctaagagtggacacgaatactggattctatgtcagctgcaagtcaggtatccctaaccatgcattgggagaataaggaaggaagaagaggaggacacagcccagaaggagtggagcacccagcaggtcacagggaaaaaccagttgagaccagagcccattctggaccccaaggaggaagcgctgaggaagcacctccttgctgccactcctctcctctgctctgcccccactccactcctgtctgtccactcaagctaacagagattcctgggctggttattcattagatttgcattgcacagtagagtatacgacagctttcacataagtcatctcagttaagccaatggaaaccatagcccaagttctatacttctgagaaaaaaagttaaaagggaattggatcttccataattaaatccagcaacatcaaagcagagatgcaaccacagcccacacagatataaccaaggagccagtccatttctttaagatggacataagatttaagccaagaagggagggaaatatgtggaaggaggaatgaaagattcagtgtacctagtccagtgaatgagacatacagctcccatcctcccatccccccaacctcaaggccacacagaggctccattctctaccctcccaatcatgtcaattaagaggttctttgtgcaaaggacagagtgcatggcagctgatgcgcgtgcagctcagatggggcaaggctttctcacaaggccccctaccccattggaaggtgatgtaggtacagcccggggcagcactcccgctttccaagcataacatccgaagagtgagcctaccaataggtctgctctgaaaactcaactttgagctcaaggaataaggtatgcacagcaatgtcctggtcaactgaaagttacagcccttgaactcaacacttccagtgaatgccctgataatggatccgtctgctgttccgttgtcccactgtgcagccaacctcacacaccttcttcatcaaggatgctgggacaccccttccccctgcccctcagaatcatccctctaaacaccaacgatcacaggtggaaaatgtgatagaatttcaactaagcgtgccctgacttcagcatccttcatgggatttcaacaataggggaatccgtgatgctgacgcatgctttggacatgcacatctcctaagcaaatacagtcaggacagtactgtgggcaaacgtactggttttaaggacgaacatcacttctagctctccaaaccagatttaacgtctgcagagagaaacctgaggacagcaagagagaagaggcagagctggaggaaaagcccagaacctggcagcactgaatgagagtttctcatcagggaaaactggtcaaccaacctctcagctgatcttagtattaatgaccttaacattgactttactgtcccatctgtagggaagggaggagtctatttccagctacactcctgaaaggatgtatgtctcacctctatgagcagagggaaggagaagcactgttttaaagctgtcagtgggttactaggaggaagaagtgaaggatgaatcatagcgatagaagtattatgaggccaggctcatgcctatgactccagcactttgggaggtggaggctggaggatcgtttgagcccaggagttcacgaaccagcctgggtaacacagggagaccttgtctctacaaaaaaatcaaaaaattagccagatgtggtagtgcatgcctatagtcccagccactcaggaggctgagaaaggaggattgcttgagccccagaggttgaagctgcagtgagccacaatcaagccactgtactccagcctgggtgacagagtaagactctgtctctaaataaatatataatgtgaaaaccatttgatttgtgacttctagcactttccaagagaaacaggatccagcttgcagctaaagcctggatggatgcagtcacgtgtccagttggaagcagatcaagttccagctccacctcagaccagcacggtaactttggacaactgacataagctctgggagcctcagcatccttgtctgttaaatgggggcaacagtaactacacttccacaggacatacggcacctttaatacatgatacctaccccctctcctcccacttcatcacctatcaaaaaaggctattcatactcaagctttaggtagaaaaaaatctgtcgccatgacaataagatttttttctgacaatggcaaacgaggacagctgggagcacctgccagggccgcatggcttcctttcaaagctcacacaacccatgagcgtgagtcactgctcctcaaacaaagcctacctgtgtaatgtgtgaacaaagtaagcaaaacagagtctcccaccttgagctcaacagcctggagatcaaagctgtctctcgaacatggagcacccagaagatctgcttccaagttggcacatgaatgtgtgaacacaatggagccctctacataaatccacttgtgtggctgcttctggacgagctctctgtctggcctccctgtattctcagtcttccccactgggctgccaaacacaggagccttgtgagaagtctgcacaaatccattgcctctagctcacatcgtcaggcttttcataccaggagaagaacagaacttgcctcccaaggtagactgggagcaacaccattggcctagagatgctcagagctagggaacgtgttgccctttctttgatgaaatctcaggcagcaggtggcattctagcatccagtgtttattccagtaacaactcttcgtgcaggtcaatgagaacccagtcatgggtgatcaactacaagtttggatttagtgacccaggagccaaatcgccagctccctgatggaacaagatgatgtcccatgcaaaaacagactctcgggtttagagattcaaaggaggaaagaacttttgaggtcccttcatttgtcaacttttgctaagcattaatatgccccccacaccctcctaggataccaggtatacagaggtaagcaaaactaattccccgcccccgcaagcacacattctggtttattatcccaggagtccaattcattcatcgtgaacaattggtggtattgccctgcatgtacctgtgcttcctaagggcgctaatttccatttgcagaatcttggtggctctggggaacctcacaacagagtcagatgtgaagcacatgaccaggggagagtcaatcaatgtgtccccccgcacccaagctactggccagaggtgtgggtctaggggtgagcattactgcacggtcagctctcaggaaggccaccacaaagccattctctccctctagatctatagagtcaggaggcctgcccacatgagaaaagtaaacttgagaatgaaactttatacagaaggggagacaatgaaaagagagagagagaccgagccaacaaatcaccccaaaagcacaacccccacacttcttagttatgtgaacaaccaaaacatccattgttttaagctggatacagttggtttctctgtaacctccaactaaaagtgaccaataggaattgggcccacagacagaggcccagggacatgtgcaaagtcatacagacacttggcactggggcaggacaggggcccagtgatggtcctgggccaagacctgattttgaactgtggctccatccttcaaagctatgagaccttaaggatattccttcatgcctctaagcctcaaatgctggagatcataacatcccagggctctgaggattaagggaagtaaaaactctggaagcacgttctcgagcctgccgcagggctgcctctctttctggacattgccccactgacaggcagcaggggctggttggaaactgatatggtttggctgtgtccccacccaaatctcatcttgaatggtagctctcacaattcccacgtgtcatgggagggaccaagtgaaaggtaattgaatcatgggggcaggtctttcccatgctgttctcatgatcgtgaatacatctcagaagatctgatgattttataaacaggagttcccctgcacaaggtctctcttccctgccaccatgtaagatgtgacttgttcctccttgccttccgccatgattgtgaggcctccccagccatgtgggactgtgagtcaattaaacctcttttctttataaattacccagtctcgggtatgtctttatcagcagcataagaatggactaatacagggatcatcatatctgttgaatccttacacagggttggtacaaggaattgggtcactggaccgggtcattatttcggggacaagcaacatcacccaatggccagtttgagcggtgaaccttgaatgcaggcgcatgggcatcctccccctaagttggtacctgacaaacagatacctaggatggtaagggcccagagaaaggtttgagaaaaccattcaggttcgatcacaacggtgcgagcagggaagggggacagcagaaaaagaaggcagcgaaggtgatgaggaaagcaattccaggaaagcccaaagcgcccagcagtcagggtggaatgagaaacccggaccgcttcagctccttggttaaccgcattcctggtttccacttagaaatttaattaaaaacccaaacacctgaattttccgctggcttgccagtggccacagattccctgaggttcagaaacaccttcctcggcttagtcctggatcccctaaagaagtctggtctgaaaccaaaggaggagggggtcacggtcaggaatcatgaagaagaggtcacagtcaggggtcatggagaatgggtcctggggggcacccccacccctcccagagagaagaaagcctccaggcaggggcgaccctgttctatcaccccaacttcagcaacaacaactttgcttcttgatgtttaattttattttatttttatttatttttttttttttttttttttttagagacagggtcttgctctgtcacccaggctggagtgcagtgggataattatagttcaccgcagcctagac
